(19) United States
(12) Patent Application Publication
(10) Pub. No.: US 2024/0132992 A1
(43) Pub. Date: Apr. 25, 2024

(54) NOVEL PSEUDOMONAS STRAIN FOR METAL RECOVERY

(71) Applicant: BRAIN BIOTECH AG, Zwingenberg (DE)

(72) Inventors: Esther GABOR, Zwingenberg (DE); Renate SCHULZE, Düsseldorf (DE)

(21) Appl. No.: 18/279,672

(22) PCT Filed: Feb. 23, 2022
(86) PCT No.: PCT/EP2022/054554

§ 371 Date: Aug. 30, 2023

(30) Foreign Application Priority Data
Mar. 1, 2021 (EP) 21159994.9

(51) Int. Cl. C22B 3/18; C12N 1/20; C22B 3/24

(52) U.S. Cl. CPC C22B 3/18; C12N 1/205; C22B 3/24; C12R 2001/38

(57) ABSTRACT

The present invention relates to a species of genus Pseudomonas identified as Pseudomonas BR87641, termed Candidatus Pseudomonas pretiosorbens, having Accession Deposit Number DSM 33684.

### FIELD OF INVENTION

[0001] The invention relates to an isolated Pseudomonas bacteria capable of the recovery of metals, a new species of genus Pseudomonas, termed Candidatus Pseudomonas pretiosorbens, the use thereof for metal recovery, a composition containing the new species and an isolated nucleic acid.

### STATE OF THE ART

[0002] A number of living microorganisms, but also nonviable, inactivated cells have the ability to bind metal ions or nanoparticles. Metal binding can occur via adsorption to the cell surface or via active intracellular accumulation of metals that is often referred to as biosorption or bioadsorption. In the case of nonviable, inactivated cells—metal ion or nanoparticle binding is believed to occur exclusively via surface adsorption. The biosorption capacity as a general characteristic of biomass results from the presence of chelating groups (e.g. carboxyl-, amide-hydroxyl-, phosphate-, and thiol-groups) contributed by carbohydrates, lipids and proteins that are displayed on the cell surface. It has been described that amounts of metals of up to 50% of the cell dry weight can be accumulated by biomass (Vieira and Volesky, 2000). United States Patent 1991/5055402 describes a process for removing metal ions from aqueous solution, using a matrix prepared from metal-binding microorganisms that have been heat-inactivated at temperatures of 300-500° C. However, specific binding mechanisms by organic surface structures are obviated by this procedure.

[0003] EP 0673350 B1 describes the accumulation of metals, including some rare earth elements such as lanthanium and yttrium, by reacting phosphate ions generated by a microorganism and metals to polyphosphates. Accumulation of the metal-polyphosphates by the microorganism of the genus Acetobacter makes the metals accessible to precipitation and depletion thus enabling purification of metal-polluted water. WO 1991/003424 describes a biomining procedure for leaching of gallium and germanium from ores using an admixture of bacteria, culture medium and crushed ore. However, no process has been described to date that could be used to recover platinum group metals in significant amounts from liquid waste materials using a microorganism from which biomass can be produced in a large scale.

[0004] Karavaiko et al., Biotechnology Letters, 18 (1996) 1291-1296 describes biosorption of scandium and yttrium from solutions using biomass of Saccharomyces cerevisiae and Aspergillus terreus. MINT Technologies (WO 2018/080326 A1 and WO 2018/084723 A1) describe methods for recovering metals, especially gold, from solid feedstocks using Cupriavidus metallidurans, Bacillus subtilis and Pseudomonas putida as microorganisms. Yet, there is a need for microorganisms which are capable of preferential binding and separation of metals, particularly precious metals, specifically platinum group metals. Furthermore, there is a need for non-pathogenic robust microorganisms from which biomass can be produced in a large scale.

### DESCRIPTION OF THE INVENTION

[0005] This object is solved by claim 1 of the present invention, which is directed to an isolated Pseudomonas bacteria capable of the recovery of metals, having at least 94% identity to SEQ ID No 2.

[0006] Surprisingly the inventors have found that the isolated Pseudomonas bacteria according to the invention has a lot of advantageous characteristics, for example
[0007] (a) being able to recover precious metals and/or platinum group metals from diverse liquid material streams such as mine drainages, communal or industrial waste waters, process streams, for example from metal refining or recycling process as well as supernatants from bioleaching processes
[0008] (b) having surface structures that result in recovery and concentration of precious metals and/or platinum group metals at a very broad pH range, ranging from acid leachates with pH<1, over neutral solutions to alkaline leachates with pH>13
[0009] (c) recovering precious metals and/or platinum group metals with living cells, inactivated cells and living and/or inactivated cells that are immobilized
[0010] (d) having a high tolerance towards external conditions, such as toxic elements and compounds, heat and pH
[0011] (e) being a risk group 1 organism that can be cultivated at high cell density

[0012] In a preferred embodiment according to the invention, the isolated Pseudomonas bacteria has at least 96% identity to SEQ ID No 2. In a more preferred embodiment according to the invention, the isolated Pseudomonas bacteria has at least 98% identity to SEQ ID No 2.

[0013] In a most preferred embodiment according to the invention, the isolated Pseudomonas bacteria is a species of genus Pseudomonas, identified as Pseudomonas sp. BR8764 termed Candidatus Pseudomonas pretiosorbens, having Accession Deposit Number DSM 33684.

[0014] As used herein the terms “species”, “strain” (with regard to Pseudomonas sp. BR8764) and “Pseudomonas pretiosorbens” can be used synonymously since the terms all relate to Candidatus Pseudomonas pretiosorbens, identified as Pseudomonas sp. BR8764 (having Accession Deposit Number DSM 33684).

[0015] Platinum group metals according to the invention are defined as Ruthenium (Ru), Rhodium (Rh), Palladium (Pd)) (light platinum metals) and Osmium (Os), Iridium (Ir), Platinum (Pt) (heavy platinum metals) and their mixtures.

[0016] Precious metals according to the invention are defined as being selected from the platinum group metals and additionally gold and silver and their mixtures.

[0017] As used herein, the singular form “a,” “an,” and “the” include plural references unless the context clearly dictates otherwise. For example, the term “a compound” or “at least one compound” may include a plurality of compounds, including mixtures thereof. Thus, for example, reference to “liquid material,” “the liquid material,” or “a liquid material” also includes a plurality of liquid materials; use of the term “a nucleic acid” optionally includes, as a practical matter, many copies of that nucleic acid molecule.

[0018] As used herein, the term “about” indicates that a value includes the inherent variation of error for the method being employed to determine a value, or the variation that exists among.

[0019] As used herein the term “biosorption” or “biosorption-based processes” means the recovery and concentration of metals from materials. In a preferred embodiment according to the invention, the recovery from platinum group metals and/or precious metals from materials. In a further preferred embodiment, the recovery from platinum group metals and/or precious metals from liquid materials.

### FIGURES

[0020] FIG. 1: is a distance matrix which was calculated by the Jukes-Cantor correction method using filter pju6q4wa (E. coli position 100 to 1427 using arb-program, Ludwig et al., 2004) based on partial 165 rRNA gene sequences. Tree Dendrogram was generated by neighbour joining method.

[0021] FIG. 2: shows sequence similarity (expressed as percentage) of partial gene sequences (912 nt) of housekeeping gene rpoB (program arb, filter SAI_AJ7174 912 nt, Ludwig et al, 2004).

[0022] FIG. 3: shows sequence similarity (expressed as percentage) of partial gene sequences (560 nt) of housekeeping gene rpoD (program arb, filter cFM25190 560 nt Ludwig et al, 2004).

[0023] FIG. 4: shows the average nucleotide identity based on BLAST algorithm (ANIb). ANIb analysis (percentage identity) was performed using program PYANI (Pritchard et al. (2016)).

[0024] FIG. 5: shows analyzation of physiological traits of Pseudomonas sp. BR8764 with the standardized system for identification of non-fastidious, non-enteric Gram-negative rods that is API 20 NE (BIOMÈRIEUX) and carbon utilization tests based on BIOLOG PM1 and PM2A plates (BIOLOG) according to the manufacturer's instructions. Results were compared with selected results of relevant strains.

[0025] FIG. 6: shows the 165 rRNA gene sequence of Pseudomonas sp. BR8764, which is SEQ ID No. 1.

[0026] BIOSORPTION: As already stated above, the isolated Pseudomonas bacteria according to the invention is capable of recovering metals, particularly precious metals, more specifically platinum group metals from liquid materials by biosorption.

[0027] The term “liquid material” means solutions of metal ions, metal complexes or metal nanoparticles that are based on water, non-aqueous solvents or organic solvents or a mixture thereof. Water-based liquid materials are for example mine drainages, communal or industrial waste waters, natural waterbodies and aquifers, as well as acidic and alkaline bioleaching solutions. Liquid materials based on concentrated or diluted non-aqueous or organic solvents or mixtures thereof usually originate from chemical processes as employed in the mining, metal refining and metal recycling industries. In a preferred embodiment according to the invention, the liquid material is water-based.

[0028] Pseudomonas s. BR8764: According to a preferred embodiment of the invention, Pseudomonas sp. BR8764 is provided as new organism. This organism can be used for recovering metals, particularly precious metals, more specifically platinum group metals from liquid materials. Surprisingly, this organism is capable of biosorption of target metals also from materials that contain elevated levels of toxic metals such as lead, chromium and cadmium. This allows the conclusion that the biomass of organism is not only able of biosorption of metals or metal recovery, particularly precious metals, more specifically platinum group metals from liquid materials but the biomass has also a high tolerance against external conditions such as toxic elements and compounds, heat and extreme pH conditions.

[0029] It has been found that Pseudomonas sp. BR8764 represents a novel species of the genus Pseudomonas. Classification of Pseudomonas sp. BR8764 to a novel species of genus Pseudomonas was supported by phenotypic (API, BIOLOG) and genotypic data. Genomic data were used for further phylogenetic analysis of partial sequences of the housekeeping genes rpoB, rpoD and gyrB and calculation of average nucleotide identity (ANI) based on BLAST algorithm using scaffold genomes. As shown in FIG. 4 ANIb similarity values are below 91%. These results further underline that Pseudomonas sp. BR8764 represents a novel species of the genus Pseudomonas. Pseudomonas strains sharing at least 94% ANI to scaffold genome of Pseudomonas sp. BR8764 are regarded to be part of the new group of Pseudomonas (Goris et al., 2007).

[0030] Furthermore, the physiology of Pseudomonas sp. BR8764 was found to be distinct from Pseudomonas species known so far as indicated by the API (Biomerieux API 20 NE) and BIOLOG (BIOLOG PM1, PM2A) assays.

[0031] DEPOSIT OF BIOLOGICAL MATERIAL The isolated and identified species Pseudomonas sp. BR8764 was deposited on Nov. 5, 2020, under the provisions of the Budapest Treaty in the Leibniz Institute DSMZ—German Collection of Microorganisms and Cell Cultures. It has been assigned to the Accession number DSM 33684.

[0032] In a preferred embodiment according to the invention, the isolated Pseudomonas bacteria according to the invention, preferably the new species Pseudomonas sp. BR8764, belongs to risk group 1. The term “risk group” is a classification system which is used in many countries for the classification of microorganisms. The affiliation to a risk group depends for example on the following factors
[0033] Pathogenicity of the organism
[0034] Mode of transmission and host range
[0035] Availability of effective preventive measures (e.g. vaccines)
[0036] Availability of effective treatment (e.g. antibiotics)
   All microorganisms which belong to risk group 1 are not associated with disease in healthy adult humans (see NIH Guidelines in Recombinant DNA, April 2002).

[0037] In an embodiment according to the invention the ribosomal DNA of Pseudomonas sp. BR8764 has SEQ ID No. 1.

[0038] USE: In one embodiment according to the invention, the isolated Pseudomonas bacteria having at least 94% identity to SEQ ID No. 2 is used for the recovery of metals, particularly precious metals, specifically platinum group metals from liquid material streams.

[0039] Preferably, the liquid material streams are selected from mine drainage waters, communal or industrial waste waters, process streams, for example from metal refining or recycling processes as well as supernatants from bioleaching processes.

[0040] As already stated above, the platinum group metals are defined as Ruthenium (Ru), Rhodium (Rh), Palladium (Pd)) (light platinum metals) and Osmium (Os), Iridium (Ir), Platinum (Pt) (heavy platinum metals) and their mixtures.

[0041] In a preferred embodiment according to the invention, the isolated Pseudomonas bacteria has at least 96% identity to SEQ ID No 2. In a more preferred embodiment according to the invention, the isolated Pseudomonas bacteria has at least 98% identity to SEQ ID No 2.

[0042] Furthermore preferred is the use of Pseudomonas sp. BR8764 for the recovery of metals, particularly precious metals, specifically platinum group metals from liquid material streams.

[0043] In one preferred embodiment, the Pseudomonas bacteria according to the invention can be used in the form of free biomass. The biomass can consist of living cells or inactivated cells or cross-linked cells. In another preferred embodiment, the Pseudomonas bacteria can be used as a composition that contains the cells within or on the surface of a sold carrier material or cross-linked cells as described as follows.

[0044] COMPOSITION: A further embodiment according to the invention relates to a composition comprising:
[0045] (a) the isolated Pseudomonas bacteria having at least 94% identity to SEQ ID No 2 in amounts effective to facilitate metal recovery, particularly metal recovery of precious metals and/or platinum group metals;
[0046] (b) at least one liquid material.

[0047] In a preferred embodiment, at least one liquid material (b) is selected from secondary resources, wherein the secondary resource is selected from waste waters from mine drainages, communal or industrial waste waters, process streams, for example from metal refining or recycling processes as well as supernatants from bioleaching processes.

[0048] As already stated above, the platinum group metals are defined as Ruthenium (Ru), Rhodium (Rh), Palladium (Pd)) (light platinum metals) and Osmium (Os), Iridium (Ir), Platinum (Pt) (heavy platinum metals) and their mixtures.

[0049] In a preferred embodiment according to the invention, the Pseudomonas bacteria according to the invention is heat inactivated at temperatures >70° C. In another embodiment the polymer used in b) is for example an alginate, a poly vinyl alcohol-alginate, gelrite, a silicate or a sol gel matrix. In a preferred embodiment according to the invention, the isolated Pseudomonas bacteria has at least 96% identity to SEQ ID No 2. In a more preferred embodiment according to the invention, the isolated Pseudomonas bacteria has at least 98% identity to SEQ ID No 2. Preferably, the Pseudomonas bacteria is selected from Pseudomonas sp. BR8764.

[0050] Further preferred is a composition comprising
[0051] (a) a preparation of living or inactivated cells of the Pseudomonas bacteria having at least 94% identity to SEQ ID No 2 in amounts effective to allow the recovery of metals, particularly platinum group metals or others, wherein the preparation of the Pseudomonas bacteria is embedded in an organic or inorganic polymer or a solid material, wherein the organic or inorganic polymer or the solid material serve as a carrier for the preparation of the Pseudomonas bacteria; and
[0052] (b) at least one liquid material.

[0053] Suitable materials for solid carriers are ceramic materials such as bentonite or materials such as polyurethane foam and plaster of paris, gypsum or nylon.

[0054] In a further embodiment of the invention, the preparation of living or inactivated cells of the Pseudomonas bacteria is cross-linked with, for example, glutaraldehyde or polyethyleneimine, or oxalic acid and polyethyleneimine.

[0055] In a preferred embodiment according to the invention, the isolated Pseudomonas bacteria has at least 96% identity to SEQ ID No 2. In a more preferred embodiment according to the invention, the isolated Pseudomonas bacteria has at least 98% identity to SEQ ID No 2. Preferably, the Pseudomonas bacteria is selected from Pseudomonas sp. BR8764.

[0056] METHOD: One embodiment according to the invention relates to a method for recovering metals from liquid material with the Pseudomonas bacteria having at least 94% identity to SEQ ID No 2. In a preferred embodiment according to the invention, this method comprises or consists of the following steps:
[0057] (a) incubation of biomass of the Pseudomonas bacteria with the liquid material;
[0058] (b) separation of biomass and metal-depleted liquid material; (c) recovery of metals from biomass; in this step, metals are released from the biomass by e.g. elution or incineration of the combustible biomass.

[0059] In step (a), the metals ions, complexes or nanoparticles bind to the biomass. In step (b), the metal ions, complexes or nanoparticles are concentrated and separated from the liquid material. This step can for example be realized by standard solid-liquid separation methods, for example by centrifugation or sedimentation.

[0060] In a preferred embodiment according to the invention, the isolated Pseudomonas bacteria has at least 96% identity to SEQ ID No 2. In a more preferred embodiment according to the invention, the isolated Pseudomonas bacteria has at least 98% identity to SEQ ID No 2. Preferably, the Pseudomonas bacteria is selected from Pseudomonas sp. BR8764.

[0061] ISOLATED NUCLEIC ACID: A further embodiment according to the invention relates to an isolated nucleic acid having at least 94% identity to SEQ ID No. 2.

[0062] In a preferred embodiment according to the invention the isolated nucleic acid having at least 95%, at least 96%, at least 97%, at least 98%, at least 99% identity to SEQ ID No. 2. In another preferred embodiment according to the invention the isolated nucleic acid having 100% identity to SEQ ID No. 2. In other words, the isolated nucleic acid is SEQ ID No. 2.

[0063] As used herein, the term “identity” when used in relation to nucleic acids, describes the degree of similarity between two or more nucleotide sequences. The percentage of “sequence identity” between two sequences can be determined by comparing two optimally aligned sequences over a comparison window, such that the portion of the sequence in the comparison window may comprise additions or deletions (gaps) as compared to the reference sequence (which does not comprise additions or deletions) for optimal alignment of the two sequences. The percentage is calculated by determining the number of positions at which the identical nucleic acid base or amino acid residue occurs in both sequences to yield the number of matched positions, dividing the number of matched positions by the total number of positions in the window of comparison, and multiplying the result by 100 to yield the percentage of sequence identity. A sequence that is identical at every position in comparison to a reference sequence is said to be identical to the reference sequence and vice-versa. An alignment of two or more sequences may be performed using any suitable computer program. For example, a widely used and accepted computer program for performing sequence alignments is CLUSTALW vl 0.6 (Thompson, et al. (1994) Nucl. Acids Res., 22:4673-4680).

[0064] SEQ ID No. 2 represents an artificial sequence. This artificial sequence was nanopore sequenced and represents the genome sequence of Pseudomonas sp. BR8764. Furthermore, the nanopore sequence was further polished with the Illumina technique. Nanopore sequencing is a third generation approach used in the sequencing of biopolymers-specifically, polynucleotides in the form of DNA or RNA. By using nanopore sequencing, a single molecule of DNA or RNA can be sequenced without the need for PCR amplification or chemical labeling of the sample. The DNA/RNA is transported through a pore which has the size of a nanometer. When it passes through, the voltage on this pore is changed. The change in the voltage is specific for each of the four nucleobases, whereby the sequence can be recognized. The nanopore itself consists of a recombinant protein that is embedded in a polymer membrane.

### EXAMPLES

### Example 1: Isolation of Pseudomonas sp. BR8764

[0065] The environmental sample for isolation of Pseudomonas sp. BR8764 was taken in Germany in Grube Segen Gottes in Haslach on 28.022012. Therefore, there are no Nagoya Protocol restrictions for this strain. This strain was isolated according to the following procedure: A small amount of environmental sample was suspended in about 500 μl 0.9% NaCl solution and plated on TSB agar plates. Incubation temperature was 10° C. Appearing microbial colonies were transferred to LB agar plates and purified by a “clean streak” on fresh LB agar plates. Small scale cultivation was done at 28° C. in LB medium (such as Bacto Tryptone #211705 (BD) 1% (w/v), Bacto Yeast Extract #212750 (BD) 0.5% (w/v), NaCl #141659.1221 (Applichem) 0.5% (w/v).

### Example 2: Phylogenetic Analysis of Pseudomonas sp. BR8764 and Definition of a New Candidatus of Genus Pseudomonas

[0066] First of all the affiliation of strain Pseudomonas sp. BR8764 to the genus Pseudomonas was shown by performing 165 rRNA gene analysis of partial 165 rRNA gene sequences (FIG. 1) using program arb (Ludwig et al., 2004). The 165 rDNA sequence of Pseudomonas sp. BR8764 is shown in FIG. 6 and SEQ ID No. 1. To further investigate phylogenetic relationships of Pseudomonas sp. BR8764, housekeeping genes rpoB and rpoD were analyzed. The primers LAPS and LAPS27 were used to amplify partial rpoB gene (Tayeb et al., 2005). For amplification of partial sequences of rpoD the PsEG30F/PsEG790R primers were used (Mulet et al., 2009). As is shown in FIG. 2 maximal similarity values are in case of rpoB around 98%. To further investigate relationship to closest related type strains similarity of partial rpoD sequence was analyzed. As is shown in FIG. 3 maximal similarity values to closest related type strains are around or below 93% including all type strain sequences whose partial rpoB-Sequence shows similarity values around 97% or 98%. Low similarity values of all rpoD sequences indicate that Pseudomonas sp. BR8764 could be a new species. To further investigate phylogenetic relationship the average nucleotide identity (ANI) analysis (e.g. Richter and Rosselló-Móra, 2009), a method to substitute DNA-DNA hybridization experiments, were chosen. The species level boundary proposed was set at about 94% ANI (e.g. Richter and Rosselló-Móra, 2009). As shown in FIG. 4 ANIb similarity values are below 91%. These results further underline that Pseudomonas sp. BR8764 represents a novel species of the genus Pseudomonas. Pseudomonas strains sharing at least 94% ANI to scaffold genome of Pseudomonas sp. BR8764 are regarded to be part of the new group of Pseudomonas (Goris et al., 2007).

[0067] To analyze physiological traits of Pseudomonas sp. BR8764 the standardized system for identification of non-fastidious, non-enteric Gram-negative rods that is API 20 NE (BIOMtRIEUX) and carbon utilization tests based on BIOLOG PM1 and PM2A plates (BIOLOG) were used according to the manufacturer's instructions. Results were compared with selected results from literature of physiological tests of relevant strains. Relevant strains were chosen based on above phylogenetic sequence analysis results (FIG. 1 to FIG. 4). Analysis revealed that the physiology of Pseudomonas sp. BR8764 is distinct from so far known Pseudomonas species as indicated by the API and BIOLOG assays (FIG. 5). Pseudomonas sp. BR8764 grows at 20° C., 28° C., 30° C., but shows no growth at 37° C.

[0068] These data further underline that Pseudomonas sp. BR8764 can be classified as a novel species of the genus Pseudomonas termed Candidatus Pseudomonas pretiosorbens.

[0069] The isolated and identified strain has been submitted on Nov. 5, 2020 to the Leibniz Institute DSMZ—German Collection of Microorganisms and Cell Cultures. It has the accession number DSM 33684.

### Example 3: Recovery and Concentration of Precious Metals Using Pseudomonas sp. BR8764

[0070] First of all, Pseudomonas sp. BR8764 was cultured on LB agar plate for two days at 28° C. Then cells from LB agar plate were suspended in 500 μl LB-medium. 50 μl were transferred to 10 mL of Riesenberg medium (see below) with 5 g glycerol per l. After over night incubation in a shaker, 417 μl of preculture were used for inoculation of 50 ml of the same medium to a final OD of 0.05. The optical density of the culture was 32 after 7.67 hours. For generation of working cell bank cryo-culture, 900 μl of suspended culture were filled in a tube, mixed with 900 μl of 30% glycerol solution and frozen at −80° C. One preculture of 50 mL Riesenberg medium in 500 mL Erlenmeyer flask was inoculated with one working cell culture. After over night incubation in a shaker bioreactor culture was inoculated using preculture to get start a OD of OD 0.1. Pseudomonas sp. BR8764 was cultured in 2 L bioreactor (Sartorius, Biostat B) filled with about 1.8 L medium for 16 hours in batch fermentation. Riesenberg medium was prepared with 26 mM KH₂PO₄ (AppliChem, #A3620), 30 mM (NH₄)₂HPO₄ (AppliChem (#A2291), 9 mM C₆H₈O₇*H₂O (AppliChem (#A4212). Then, after autoclaving 5 mM MgSO₄*7H₂O (AppliChem, #A4101), 1 ml trace element solution (50 mM FeSO₄*7H₂O, 10 mM MnSO₄*1H₂O, 10 mM ZnSO₄*7H₂O, 2 mM CoSO₄*7H₂O, 2 mM CuSO₄*5H₂O, 2 mM NiSO₄*6H₂O, 2 mM Na₂MoO₄*2H₂O, 2 mM Na₂SeO₃, 2 mM H₃BO₃) and 15 g glycerol per liter (Sigma-Aldrich, W252506-25KG-K) was added. pH was adjusted to 6.8 using 5M NaOH-solution. After harvesting of biomass and washing with 0.9% NaCl-solution the pellet was frozen at −80° C. and lyophilized, referred to as dry matter (DM).

[0071] To generate test solutions commercially acquired ICP-standard solutions from ESI-Elemental Scientific (www.icpms.de) were diluted to about 100 ppm in either 10 [%] HCl for test solution 1 or 7.5 [%] HNO₃ for test solution 2. Following standards were used: PdCl₂ (10% v/v HCl, 1000 ppm), CGPD1-125ML; Pt (10% v/v HCl, 1000 ppm), CGPT1-125ML; RhCl₃ (15% v/v HCl, 1000 ppm) CGRH1-125ML; IrCl₃ (10% v/v HCl, 1000 ppm) CGIR1-125ML; Al (3% v/v HNO3, 1000 ppm) CGAL1-125ML; Fe (2% v/v HNO₃, 1000 ppm) CGFE1-125ML To analyse elementary composition in test solutions ion-coupled plasma mass spectrometry (ICP-MS) was applied. Elementary composition of test solution 1 and 2 was as shown in Table 1.

TABLE 1
Elementary composition of Test solution 1 and 2

| | [ppm] | | | | | |
|---|---|---|---|---|---|---|
| | Pd | Pt | Rh | Ir | Al | Fe |
| test solution 1 (ts1) | 100 | 102 | 98 | 97 | 105 | 103 |
| test solution 2 (ts2) | 98 | 99 | 97 | 91 | 108 | 100 |

[0072] Experimental set-up for biosorption experiments was as described as follows. Dry matter (DM) of biomass prepared as described above was weight into 2 mL-test tubes. Then 1.5 mL test solution were added and incubated at room temperature for 3 hours by mixing using an overhead shaker. Afterwards the samples were centrifuged for 10 min at 13300 rpm. Supernatant was taken to analyze elementary composition by ICP-MS. Metal binding to biomass was calculated by subtracting ICP-MS-element value of supernatant from value in test solution. Recovery was expressed as [%] bound as shown in Table 2.

TABLE 2
Biosorption of precious metal on dry matter of Pseudomonas sp. BR8764

| | [%] bound | | | | | | | | | | | |
|---|---|---|---|---|---|---|---|---|---|---|---|---|
| | Pd | | Pt | | Rh | | Ir | | Al | | Fe | |
| [mg] DM | ts 1 | ts 2 | ts 1 | ts 2 | ts 1 | ts 2 | ts 1 | ts 2 | ts 1 | ts 2 | ts 1 | ts 2 |
| 30 | 92 | 94 | 24 | 21 | 9 | 16 | 16 | 14 | 5 | 15 | 71 | 88 |
| 60 | 98 | 97 | 40 | 43 | 17 | 32 | 25 | 26 | 11 | 26 | 75 | 85 |
| 90 | 98 | 98 | 61 | 61 | 22 | 40 | 29 | 29 | 17 | 35 | 69 | 82 |
| 120 | 97 | 96 | 79 | 82 | 26 | 45 | 34 | 36 | 20 | 34 | 59 | 73 |

ts: 1.5 mL test solution

[0073] As shown in Table 2 using dry matter of Pseudomonas sp. BR8764 recovery of palladium above 90% was shown in acid HCl- or HNO₃-leachates. Recovery of platinum was observed up to around 80%. In HCl-acid leachate recovery of rhodium or iridium up to around 30% was shown. In HNO₃-acid leachate recovery or rhodium or iridium was even higher. Recovery of up to around 40% was determined. However, some aluminium or iron was also recovered, but preferential biosorption of Pd was observed.

1. An isolated Pseudomonas bacteria capable of the recovery of metals, wherein the isolated Pseudomonas bacteria comprises a nucleic acid having at least 94% identity to SEQ ID NO: 2.

2. The isolated Pseudomonas bacteria according to claim 1, wherein the isolated Pseudomonas bacteria comprises a nucleic acid has at least 96% identity to SEQ ID NO: 2.

3. The isolated Pseudomonas bacteria according to claim 1, wherein the isolated Pseudomonas bacteria comprises a nucleic acid has at least 98% identity to SEQ ID NO: 2.

4. The isolated Pseudomonas bacteria according to claim 1, wherein the isolated Pseudomonas bacteria is a species of genus Pseudomonas, identified as Pseudomonas sp. BR8764 termed Candidatus Pseudomonas pretiosorbens, having Accession Deposit Number DSM 33684.

5. The isolated Pseudomonas bacteria according to claim 1, wherein said Pseudomonas bacteria is capable of the recovery of platinum group metals, metals and/or precious metal from liquid materials.

6. A method, the method comprising using the isolated Pseudomonas bacteria according to claim 1 for metal recovery.

7. The method according to 6, wherein the metal recovery comprises recovery of precious metals and/or platinum group metals.

8. The method according to claim 6 where the is from liquid material streams.

9. The method according to claim 8, wherein the liquid material streams are selected from mine drainage waters, communal or industrial waste waters, process streams, for example from metal refining or recycling processes as well as supernatants from bioleaching processes.

10. The method according to claim 7, wherein the platinum group metals are selected from the group consisting of palladium, platinum, ruthenium, rhodium, osmium, iridium, and their mixtures.

11. The method according to claim 6, wherein the isolated Pseudomonas bacteria is a species of genus Pseudomonas, identified as Pseudomonas sp. BR8764 termed Candidatus Pseudomonas pretiosorbens, having Accession Deposit Number DSM 33684.

12. A composition comprising:
(a) the isolated Pseudomonas bacteria according to claim 1 in amounts effective to facilitate metal recovery, particularly metal recovery of precious metals and/or platinum group metals;
(b) at least one liquid material.

13. The composition according to claim 12, wherein at least one liquid material (b) is selected from secondary resources, wherein the secondary resource is selected from waste waters from mine drainages, communal or industrial waste waters, process streams, for example from metal refining or recycling processes as well as supernatants from bioleaching processes.

14. The composition according to claim 12, wherein platinum group metals are selected from the group consisting of ruthenium, rhodium, palladium, osmium, iridium, platinum and their mixtures.

15. An isolated nucleic acid having at least 94% identity to SEQ ID NO: 2.

The application's sequence listing, which the Patent Office published only in electronic form, follows.

SEQUENCE LISTING (2 sequences)

SEQ ID NO: 1 - DNA, 1423 bp, Pseudomonas sp. BR8764
gtcgagcggtagagagaagcttgcttctcttgagagcggcggacgggtgagtaatgcctaggaatctgcctggtagtgggggataacgttcggaaacggacgctaataccgcatacgtcctacgggagaaagcaggggaccttcgggccttgcgctatcagatgagcctaggtcggattagctagttggtgaggtaatggctcaccaaggcgacgatccgtaactggtctgagaggatgatcagtcacactggaactgagacacggtccagactcctacgggaggcagcagtggggaatattggacaatgggcgaaagcctgatccagccatgccgcgtgtgtgaagaaggtcttcggattgtaaagcactttaagttgggaggaagggttgtagattaatactctgcaattttgacgttaccgacagaataagcaccggctaactctgtgccagcagccgcggtaatacagagggtgcaagcgttaatcggaattactgggcgtaaagcgcgcgtaggtggtttgttaagttggatgtgaaatccccgggctcaacctgggaactgcattcaaaactgactgactagagtatggtagagggtggtggaatttcctgtgtagcggtgaaatgcgtagatataggaaggaacaccagtggcgaaggcgaccacctggactaatactgacactgaggtgcgaaagcgtggggagcaaacaggattagataccctggtagtccacgccgtaaacgatgtcaactagccgttggaagccttgagcttttagtggcgcagctaacgcattaagttgaccgcctggggagtacggccgcaaggttaaaactcaaatgaattgacgggggcccgcacaagcggtggagcatgtggtttaattcgaagcaacgcgaagaaccttaccaggccttgacatccaatgaactttccagagatggattggtgccttcgggaacattgagacaggtgctgcatggctgtcgtcagctcgtgtcgtgagatgttgggttaagtcccgtaacgagcgcaacccttgtccttagttaccagcacgttatggtgggcactctaaggagactgccggtgacaaaccggaggaaggtggggatgacgtcaagtcatcatggcccttacggcctgggctacacacgtgctacaatggtcggtacagagggttgccaagccgcgaggtggagctaatcccataaaaccgatcgtagtccggatcgcagtctgcaactcgactgcgtgaagtcggaatcgctagtaatcgcgaatcagaatgtcgcggtgaatacgttcccgggccttgtacacaccgcccgtcacaccatgggagtgggttgcaccagaagtagctagtctaaccttcgggaggacggttaccacggtgtgattcatgactggg

SEQ ID NO: 2 - DNA, 6856497 bp, Pseudomonas sp. BR8764 (residues 1-1,714,125 of 6,856,497)
caccctgcaacgtattgcccggaatcggcaggataaatggcgtcgagccggtggcaatcaacagacggtcgtactcggcttcggtgccgtcctcggcgatgacgaggcgtttgacgcggtcgatctgcaccaccttgcggttgagcaacagcttgatgttgttgtccaggtaccaagccaggtcgttgagcacgatctcttcgaaggtctgctcaccggccagcaccggcgacagcagaatacggttgtagttggtgtggggctcggcgccgaacacggtgatgtcgtataggtcactgctcagcttgagcaattcttcaagggtgcgaaccccggccatgccgttgccgatcatcactaatttgagttttttcatgtcgttctccgcaatggctcgacaaatcacgcgcaaacaaaaacggcgccccgctagttacctagcgaggacgcctttgtcctggtcccgttctctcgggaagcgcggcccttcgacgttgaaggggcggctatatgtctattgttgggttgagtaatgcagtggttgtgccaagttcggtgaggcccggttttattggccctttgcccggagctcaatggcttttcgcgctttagtggtgcaacagccagtacagcagcaccagattgaacaataacgacgccatcgccagggtttgccagaccttcagcggttcgcgctccagcagaggccttggccgaacgctgagttcgcggcgatcggcctgctccagcacgagcaaccattcttcggcggtttcataacgctgcgccggttgggcggccacggcccggtccaggctgaggggcaaccagtccggcagatcgggacggtagcggctggcgctgacagcctgagtgaaacgtggccgttgaaatgcttcgatttccccgtagggatagtgcccggtcagcaagtaatacagggtcacgccgacgctgtataaatcctgttgcggcgtaggccgatcaccaccgaatgcctcgggcgcgataaagctcggcgtgccgggcagcaaatgggcgcggtcttcagagagccccgggcagtaggccaggccgaaatccagcacgcgcagttcgccatcgtcgcccaacagcaggttctgcggcttgatatcgcggtgcaggatctgccggcgatgcagcatgcccaccgcccgcagcaaacgctcggcgatggattgccattgcgcaagaggtaacgggccttgttgcttgaacagctgcgcaagggtttgcccgcaatattcccgcatcacgtagtacaaatgctggcgcccgctggcggcatggacttcaggaaatgcacgcccggcaacacgtcgcaaaaaccactcctccgacagcaacgcctggccggcgtcgctgtcatcgtcgcgattgaggggcaaggttttcagcagccagggttgctgctgggcatcacgtacgcggtagagcaacgattgccggctctgcgccagcacgctttccacctgccagccctcaaagcgctgcccgggtttgagcggcggtggcaatggccattgctgcagctgcaccaatgcatcgccgagggtggccgcgccgagtgtgtcgatgcgcaccagcagggcgctggcgttgtcgaggctgccggccaggtgcgcagcattgaccagggtgttgaccgccacctcaaggtcggcttgctcgcgcaggatcgcgcaaatgctgtgatcgccgagggtggcccacacaccgtcactgagcagcaggaagcattcgccctcgcgcagttcgccatccatgaagtccagcaccaggtgttgatccaggccgagggcgcgcttgagcacatgttgcatgcccggttgttcccacacatggtcctcgctgatgcgctgcaattcgtcgtcgagccagcgatacacccggcaatcaccgacgtgggccaaggtgaaacgctggccgcgaaacaccagggcgctgagggtggtcagcaggggttggccacccccgttggcttgcaaccagcgattttgcgcgagcaacaaacgttcgagcgcctgggccacgccccaggtttgcggcgtggcgtagtagtccagggccagcgcctgcaaggtcgagcgtgcggccaggccgccgtcggcacactggctgacgccgtcggccagtgcgcacaagtagcctttgctcgcggccagttccgccacgggcgtgaccacgcgcagcgcgtcctggttttctgcccgcggcccaatggcgctggcctgggcgatgctcaggtgcaggctcatcagacgcgtgcggcggtcacggcggccgaaccccaagtggttctccagcgacgtttgacgccatgcaggccaaaccaggccagcacgccgaggctggcaaacaaccacagggccagttgatagctgccggtgctctgtttgatcgcgcccatgcccgccgccagggcaaagccaccgataccgccggccatgccgatcagcccggtcatcacgccaatttcaaggcgaaagcgttggggcaccagttgaaacactgcgccgtttcctgccccgaggccgagcatggtgcaaacgaaaagcgccagtgccgcgtaggaactcggcagattaaagcccaccgccgcgatgcagatcgccgccacgctgtacatgccgagcagggtgcgaatcccgccgaaacgatccgccagggcgccgcccaacgggcgcatcaggctgccgccgaacacgcaggcggcggtgtagtagccggcggtgaccgggctcaagccgtactggtcgttgaaataaccgggcagggcgctggccaagccaatgaaaccaccgaaggtcacgctgtagaagaacatgaaccaccagctgtcgcggtcgcccaaggctttaaagtagtcagccatggacttggctttcgggcgctgcggtgcattgcgcgcgagccaggcgaagacgatcagggtgatcaccagcggaatcagcgcaaagccgaacacgttgctccagccaaacgcggcggcgagcaccggtgccagcaaggcagcaaacacggtgcctgagttgccggcgccggcgatacccatggccttgccttgatgttcagccgggtaccactgggaggccaggggcagggcgacggcaaaggacgcgccggccatacccaggaacacgcccagcaacaacgcctgctcataactgtgaataccgagcttccaggcgccaaacagcgctgcaatgacaatcacctggccgatcagcccggcggttttgggcgacagcttgtcggccagcatgcccatcaaaaagcgcagcaccgcgcctgccaatatcggggtcgccactaccaggccacgctgttgggtggtcaggtgcaggtcggcggcaatctgcaccgccagagggccgagcaggtaccagaccatgaagctcaggtcgaaatacaggaacgcggcaaacagggtcggggtgtgcccggatttccagaagcttgatttcatcacgcacctcaacggttggggtcttttaagaaggccgagtgatggggtcgccggctaaaggccgccccaccggccccacgctctggggccaaaacgaaaaaacgccgccaccgggttcgcgagggcaaaccggatgtgcgacgtctttgtcgtggaggggcaaccgccgttggctacctgtgatgaatgcttagcaagagctgagccagatcagccgagcagctcgctcatggcgataatctgctctgccacctggatcagtttctgctggcggctcatggcctggcggcgcatcagtgtgtaggcctcttcttcattacaactcttcattttcatcagcaagcccttggccagttcgatgcgcttacgctcggcgagctgctggtcgcgggcctggagctgggcacgcagggcctggtcactctcgaagcgcgccatggccacgtcgaggatcggctgcaagcgctgggcctggatgccttcgacaatataggcgctgaccccggacttgatcgcctggcgcatcacgttcgggtcgtgctcgtcggtaaacatcacgatcggccgtggctggtcgcggctgaccagtaccacttgctccatgacatcgcggccgggtgactcggtatcgatcagaatcacgtccgggcgcaccgtttcgacgcgtgcaggcaggtcgatggtcaggccggactcgtcgatcacctcgaacccggcctcggtcagcgcggccttgaggcgcccgaccttgcgcggggtgtcgtctatcaacaggattcgcaacatatccgttctcctgtcagcgcaaggcttggcggccggcgtggtcagccatggcatgcaagcgaaagctgcgggcgtaggtggcagggtcagtaccgtcccagatcttgccgtcgatcaactggctgctgcgcaggtcctggctgttcgccggcacgccgatggcagcggcggcctggcgatacagggccagttgttgcacctgacgggagacgccgaggtagtccgggtcttcgcgcagcaggccccagcgtcgaaattgggtcatgaaccacattccgtcggacaggtagggcaggtttacctcgccatcgccgaaaaagcgcagcgcgtgggggtcttgccaagtgttgcccaagccatcgtcgtaagcgcccaacaagcggggttcgatgcagtccagcggcgcatcgaggtagtcacgggcgctgagtagttgtgccgtggagcgacggttttcctggctttcttcgataaagcggcttgcttcaagaatcgccatgaccagtattcgggcggtattggggtactgatcaacgaaggcctgggtgcagcccaggaccttttccgggtggtccggccagatcgcctgggtggtcgccagggtaaagccctggttctgctttacggcgctggcgcaccagggttcgcccacacaaaaaccgtcgatacgcccggcttgcagatgcgcgaccatctgcggcggtggcaccaccacactgtccacatcctgcaacgggtggatgccttggctcgccagccagtaatacagccacatggcatgggtgcctgtgggaaatgtctgggcgaaggtcagttttgtgcggctttggtgcacgtgacggtccagcgcctcaggagtgatcacgccttgctgctgcaggccgtgggacaggttgatgctctggccgttctggttcaggcccatcagcacggccatgtcggtcggtgcgacgccaccgatgcccaggtgcacggcgtagatcagcccgtagaggctgtgggcggcgtccagttcgccactcaccagcttgtcacgtaggttggcccaggatgattgacgcttgaggttcagtgtcagcccgtagggttgggcgaagccctgggtcgcggcgacgaccagtgaggcgcaatcggtcagggccatgaagccaaggttcaggctgctcttttccggggcatcactgccatttacccaggccagcgaagtgttcaccgggctgttgccgaccgaatcgttcatcaacacctaccttttctctcaaaaaaaagcgtcgttccctgagatggcagtacaagccattgtgggtaacgacgcctttgcccgtaagcccgctccgacgttggcgcgcgctttgatgcagtgtctgtagcaaggcacatgccacgggcagtaaggcggagtttgccgtcagctttccatcaagattgaaagccgacggcctctcagtatggccgcctctttacgccagactgccaggaaccccacggtgtctatcgattctccggcaatgttgagcggccactggttgtgccggtggctgctgtgccttgcgttagtgtccgtcaatgttcccgcccaggcggagcgctaccaggcccgggatgaaagcctgcacaccttttttaccgtgttgtcggtgcctctggggctgcccgtcgtcgtcagccgcgatgtggcgcgcaaacgcatttccggtgccttcgatttgggcgcggcgcagcgaacgctggaagtggtcgccgagcagcaaggcctgatctggtacagcgacgggcaggcgttttacgtgtatgacgcgggtgaggcgaaaagctcggcagtggcgttgcggcatatctcggccgacaggttgcgcaccttcatgcgccgttccgggctggatgaatcgcgctatcccctcagggaaagcggcgcacagacgttctatgtgaccggcccgcccaattatgtggatcaggtgctgcacctggcccagttgatggacaggcaacgtaccgaggtgcgcgtgggcgcccagacctttggggtggtgcaggtattcaatacccacgttaccgaccgtcagtacgtcatgggccatgaaaagatcactgtcccgggcatggcctcaatgctcgaaaccctgctggccatcgagcagaaggcgaatgcgaagccgccccgaagcgtgttggccgacaagagcctggtggtgatcgcataccccgactccaacagcctgctggtcaagggtaagcctgcccaggtcaaggcgctggaggaactggtggcggagctcgacaaacccaagcgggcgattgaggtgtcgctatggcgagtggacgtggaccgtgacgaactgcagaaaatggacgtggcctgggcccaggcaggtaacaccacggcggcgccgacccatgtagtggaacccctggaagataaccgtttgatggcgcagctcattgcactggagcggcggcgcaaagcccgcgttgtcgcgtttccggtggtcctcacccaggaaaacgtgccggcggttttccaggacagccataccttctacctgcccaggcccgcaggtgatagcactgagttgcagcccgtattgtatggcacgcaagccagtgtgctgccgcgctttgcgcaagccaacgagattgaaatgcagctgacccttgaggatgagcggcagatggggggtaaacccaagcctgattcagcggcggcggtgggccgtgtggggctcagcacggtcgtgcgcgtgccccagggccgacgcctttggctgggtggtttccggcgtgaggacgaaggggctgtgcgcaatcgacgtgccgaggtgcgactgtttgtgatccaggcccgggcggttgggaacgagcccaagctgctggccggcgcgatcgggcctccggcgctgacacaacgtcaatatgagcgcgtgcaacgcgcgtttgtgcgggaaaaccatgaaagcccggcaatggaatgacgttgcggttggccatggtgaaaagtcctacgtggcgcctgccaaaagcctcgattacataggctttttcctaaggatgtgcggggctcaggtttttatagtcgcggcattggcgtatcggccgtttctggaagtaaggaattcaatgtcagtagtcgaatgcagaggtgtgtatgaccctcgacagtgatgggctgacagcctcacggttttttgccgggtggaccttgcatggcgatggccggttgaccggcgaaggcgtggatattcaattgccgcccaaggaatggcatgtgttgcacctgctgctggcttccgcgggggcgctgatgaccaaggactatctgctggagatggcttggcctcatggggatgttgcggaggagtcgctcacgcgctgcatctatgcgttgcgtaaacacctgaaggccgacaaggggttcattaaaacgatctacggcaggggctaccgctttacctgtgcggtgagcgttgaagagcatgcctcccgccagattgggcagggcagggcgcaacgtatctgtttggcgtgtggccaggtgacccatgattaggcgcctggtcaacggtgtgttgttgagtatctggttgggcgcccagcaagcctgggccggttgctgggatgacgtggcccgccgttacgacatcgagcctgagttgttgaaggccattgctgcggtcgagtcgggttaccgtgagggggcgttgaacacggccaacagcgatggctcgcgggatattggcttgatgcagatcaacagcatgcacctgccgcgcctggccaagcaggggatcactgagcagcggttgttgagtgagccttgtttatcggtcgaagtgggtgcctcgatcctggccgagttcattcaacggttcggctacaactggacagccgtgggttcctacaacgcgggtgcggcgcctgagcgtgcggcattgcgcctgcgttatgcagaaaagatctgggcccgttatgaggcgctggttgcgcaacgccgctgatgattggatggcgcctcgcacccgggccgtcaccccggctataatcggcgccacctatcgtcgccatccgagtctagcccgcccatgtataccctggcccgccagctgttgttcaaactctccccggaaacgtcccacgatctgtccctggacctgatcggcgccggtggccgcctggggctcaatggcctggtatgcaaggccccggcgaaaatgcccgtgtcggtgatggggctcgatttccccaacccggtcggtctggcggctggcctggacaagaacggcgcggccattgatggctttgcgcagttggggtttggttttgtcgaaatcggcaccgtgacgccacgcccgcagccgggcaaccccaagccgcgcatcttccgcctgccggaagccgaggcgatcatcaaccgcatgggtttcaacaacctgggcgttgatcacctgctggcgcgggttcaggcggccaagtacaagggcgtcctgggtatcaatatcggcaagaacttcgacacgccggtggagcgcgcggtagatgactacctgatctgcctggacaaggtctacgcccatgccagctatgtgacggtcaacgtcagttcgcccaataccccgggcctgcgcagcttgcaatttggcgactccctcaagcaactgctcgaagccttgcgccagcgccaggaagacctggctgtgcgccatggcaagcgcgtgccgttggccatcaagattgccccggacatgagcgacgatgaaaccgtactggtcgcccaggcgttggtggattcgggcatggacgcagtcatcgccaccaacaccaccctgagccgtgttggcgttgaagggttggcccatggtgacgaggcaggcgggttgtcgggcgcgccggtgcgtgatcagagcactcatatcgtcaaggtgctggccgccgagctggcggggcgcttgccgatcatcgcggtgggcggtatcaccgaaggcaagcacgcggccgagaagatagccgccggcgccagcctggtgcagttgtactcgggctttatctacaaggggccggcgctgattcgcgaagcggtggatgcaatcgctgcactgcgctgaggcttttactgtgggagcgggcttgctcgcgaaagcgtcgggtcagtcaggctaactgttaatgacacgccgccttcgcgagcaagcccgctcccacaaaagccgtgtttcttcaggccattaaaaagggctccctaaaggagcccctgggccgaagcccgccgcccggatggggcgcgcgtggttaaggtgttgcagattcgtgctgatgtcggagttaagtgcccttgattagccgacggcgtgaagttcgttgagtctgtggatgcccgcagtgccagtcataccgtcccagttgtcgccgcgtccttctcgccagccgttgatccaggcttggcgtaccgacggtagagtaaatgggcaaagctcacgggatttgccatgaacgccatattgatatccgcgtaaaaatgctctttccaacggatcacgcttaagtcttctcatagggtgtttccctcacttgttgactgtctagatatccttcgaccccggggggaggtcgggcagagtttttctgccgttggtgggctcgctgccggcgtggcgagcctatgtgtcgacgtcgttacggcgtcaacctgtgttgagttctaaccaataggtcacatggattcaatgatcgttttgtcataagcacgtaacgataatgatgctatagccataagctgggatggcttttcgccccatttaaaaggcaaacccagctatgatgtgccctgcaaagaggatgggtttaatcctttagtgagaatgcccgcccgttgcagtcggttattattcgacgaagggtcggaatatttctttttgttgctgcaaattctttatctgcttcgacaataaagggccaaatgccctgaagccgaggtggaacggcacattcgtgccacgcgagcactcttcaagaaaagtgcttgataaaaacccgagccggcgatgcgtcgcccgttcatttattgctgaaaagcctggaatgccccatgtcggaccgttttgaactcttcctcacctgccccaagggcctcgaaggcctgctgatcgaggaagccgtcgggcttggccttgaggaagcccgcgagcacacctcggccgtgcgcggcatggccgacatggaaaccgcttaccgcctgtgcctctggtcgcgtctggccaaccgcgtgttgctggtcctcaagcgcttcccgatgaaggacgccgaagacctctaccacggcgttctggatatcgaatgggccgaccacatggtgcccgacggcacgttggccgtggaattcagtggtcacggttcgggcatcgataacactcacttcggcgcgctgaaggtcaaggatgcgatcgtcgacaagctgcgtacgccaactggcgagcgcccgtccatcgacaagatcaacccggacctgcgtatccacctgcgtctggaccgtggcgaagccattctttccctcgacctgtccggccacagcctgcaccagcgcggctaccgcttgcagcagggcgccgcaccgttgaaggaaaacctggcggcagccattttgatccgtgccggctggccgcgcattgctgccgaaggcggcgcgctgagcgacccgatgtgcggcgtgggtactttcctggtcgaaggcgcgatgatcgccgccgacatggcgcccaacctgaatcgtgaactgtggggtttcaccacctggctcggccacgtcccggcgctgtggaagaaactgcacgccgaggccgctgaacgtgccgccatcggcatgaacaagccgccgctgtggatccgtggctacgaagccgacccccgcctgatccagcccgcgcgcaataacattgaacgcgccggcctgagccactggatcaaggtgtaccagggtgaagtcggcaccttcgagccgcgcccggaccagaaccagaaaggcttggtcatctgcaacccgccgtacggcgagcgtttgggtgacgaagccagcctgctatacctctaccagaacctcggcgagcgtttgcgccaggcgtgcatgggttgggaagccgcggtgttcactggcgcaccagacctgggcaagcgcatgggcattcgcagccataaacagtattcgttctggaacggcgcgttgccgtgcaaattgctgctgatcaaggtcaacccggaccagttcgtcacgggcgaacgtcgcaccccggaacaacgccaggccgagcgtgagcaagccgcttacgaccaagccccggctgagccgcaagaacgccagtacaacaagaacggtaacccgatcaaaccggcaccggcacctgtggttgagcaggcgcgcctgagcgaaggcgggcagatgtttgccaaccgtctgcagaaaaacctgaaactgctgggcaagtgggccaagcgtgaaggcgtggattgctaccgtgtgtacgatgccgacatgccggaatactccatggccatcgacctgtaccacgactgggtccatgtgcaggaatacgccgcgccaaaatccatcgacccggaaaaagcctccgcgcgcatgttcgatgccctggccgctattcctcaggccctgaacatcgacaagggccgcgtgctggtcaagcgccgcgagcgtcagagcggcaccaagcagtacgagcgccagagcgcccagggcaagttcaccgaagtcagcgaaggcggcgtgaagttgctggtcaacctcaccgactacctggacaccggcctgttccttgaccaccgcccgatgcgcttgcgtatccagaaagaggcggccggcaagcgcttcctcaacctgtattgctacaccgccacggcgagcgtgcacgcggccaaaggcggcgcgcgcagcaccaccagtgtcgacctgtccaagacctacctggactgggcgcgtcgcaacttctccctcaacggtttctccgacaagaaccgtctggagcaaggtgatgtgatggcatggctggaagccagccgcgatgagttcgacctgatcttcatcgacccaccgaccttctccaactccaagcgcatggaaggcattttcgacgtgcagcgcgaccacgtgcagttgctcgacctggccatggcgcgcctggcgccgggcggcgtgctgtacttctcgaacaacttccgcaagttcgcgctcgaggacaacctcagcgaacgctatgcggtcgaggagatcagcgacaaaaccatagacccggatttcgcacgcaacgcgaagattcaccgggcgtggaaaatcaccgcgcgctgatccctgcaccaagttggcacaaaaaagccgcaagccttgattattcgaggcttgcggcttttttgcgctggtcaaacacaatgcctgtggctataactgaaagcctagccaaagtgacacccccgcacgctggcgttgtgagtgttgcctatgccgttacaagccgtccgcccgaaaatccttggctttatcagtgagcaggcgtcggcttggctggtggcactggtggtgttattggcaggtggcgcgctgacggtgatcgttgcgtgggcggctgctgacctctatcaacaacaggtgcgccagcgtttccagttgctggtcaacgagcgttacacccgcttgcaggagcgtttcgaggaccaggaacaacgcttgggcagcctgcgcaggttcttcgtcaattccagtgatgtctcccgtgcggagttcgacggtttcgcccagcctttgctgttgcgcgcccgtgcctatgcgtgggcaccgcgaatttttcgggaccagcgcagccagtttgagcaggaaatttcgcgccagcgtggcgttcccttcgccatccgcgagctgagttcgtcgggtgagctggcgcctgcttccgaacgcgatgaatacgtgccggtgctctacagccagacccaaagcttgctggggtcgccgttgggttttgacctgctggctcaaccgttgcggcgctcggcgcttgaacgggcgcaaaaaaccggcaagccagcggtgtcccaaccgatgcaattggtgggggtggaaccggcctatgccgccggcgtgctgttggtgtcccccgtcagcaaatcccctgaggtcgagccctacgggtttgtgatggcggtgatcagcatgcgccagttggtagccgacggcttgcccaaacccaatcgcgacaacctggtgatgcagatcgtcgacacctctgacacccaacaacgtgtgctgtacgcgtccagcaatgccgtcggcaacagtgacctcacggcggcgcgccgtctcacccttggcgatcacgtgtacgcactgaccttgcgcaccagccaggtgttcgaccaggccaatcactcgtcgatgaacaccatcctcaccatgggcgggctcctcagtctgttgctcagcgtattgctgtacgtgttggtcagccagcgccagcgcgcactgaaactggtggagcaacgcactgtgcaattgcgcctgcgcgagcaggaactgcgtggggcgcacgggcaattgcgcagcgtgctgaatgcggccacgcaagtcgcgatcatcgccactgacttgcgtggtgtgatcaacaccttcaacgctggcgccgagcagatgctggggttcaaggcagagcaagtgctggggcgcatgaccctggaaagcctgcacctggccgttgaacttgaggcgcgcgccgccagtttgagtgtggccttgggcaagcgcattccgccaagccaggccatgttggtggagagcccggatcacttgcgcgaagctcgcgagtggacgctgttgcgccaggacaacagcccattgaccgtgaatatgcttggtactgtgctattggatgatcatggcctgtggatcggccacctggcgatttacctggacgtcacggagcagaagcgcgcctacgaagcgctggccgtgcgggaccgcctgctgaaaaaactcagctcccatgtgcccggcgggatcttccagttcaccctggagccgcgagacaactggcgtttcatctatgccagcgatggcattcgcgatatctatgaaatcgaacccgctgtgttgcaacacgatgcgaacaaggttttcgagcgcattcacccacaggacgccgagcgggtgcgggcgtcaattcgtttgtcggcgctgcagttgagccattggcgcgaagagtaccgcgtgttgttgccgcaacggggcctgcgctggattcgcggtgaagcgacgcctgaagagctggcgggcggcggtacgctgtggcacggctacgtgtcggatatttccgatctcaagcgggttgaggaagaactgcgcgcgctgtcgatcaccgacgcactgaccggcatccataaccgtcgctatttccaggaccggctcaaggccgagatgcttcggctcaatcgcagttcgggggcgctgtcgttgatcatgctcgacattgatcatttcaagcggatcaatgacgtgcacgggcacggtgtgggcgacggagtgttgcaggaggtatgcaaacgtatcggccagcgtttgcgtcgcaccgacgtgttttgtcgtctgggcggtgaggaattcgtggtgctgtgccccaacacggatgccgaacaggcttacagcgtggcgatggaattgtggcagtcgttgcgcagtgcaccgatggagagggtgggagtggtgaccgccagtttcggtgtagccagttgccggcttgatgaaggcattgacgggctgttactgcgcgcggattcggcggtgtatgtggccaagcaggcgggcagggacagggttgaggcggagcggttgcgcgcttgagtgccaacacagccttaaaccgtgggagctggcttgcctgcgatagcatcacctcggctcaactggaataccgaggtgtccgtatcgcaggcaagccagctcccacacaagcccgctcccgcactaaagtacaggtgcggccgctgcgattttcggttggcgatacaggtcgagcagcacctgatccagcaccgatgacgcgccccacggtttcgaatcgttaagaatcgccaccaccacccaagtattgccgttgttgtcgcggctgaacccggaaatggcgcgcacagtgttcagggttccggtttttacgtgggcttcaccccgcatggccgtggttttcaagcgtttgcgcatggtgccgtcggtaccggcaatcggcagcgagctgatgtattcggcggcgtacgggcctttccaggcggcttgcagcatggccgccatctcacgggcactgacccgttcggcgcgggacagcccagagccgttttccatcaccagatgcggtgcggtgatgcctttcttcgccagccactggcgcaccacacgctgcgcggccttggcatcgtcgccatcggcatcgttgcggaactgcgcgcccaaactcagaaacagttgctgggccatggtgttgttactgaacttgttgatgtcacggatgatttccgccaggtctggcgaaaacgcacgggccaataccttcgcgtccttcggtaccggcgcctgaatatcgcggccctggatggtaccgcccagttcctgccagatcgcgcgcacggcgccggcggtgtaggtggcgtggtccagcagcgacaggtaggtctgcgaactgcagccatcggccaattggccgctgacggtcacggtcacactgccatcggcggcggtgacggggctgtagcgcacgtcgccggtgcattgcttggcgttggagactttcacctggttgtcgatgcgaatgctcgcaatcggcggttccaccgacacgatgacccggcccgaatcattgcgggtcacgaagcgcaaagccttgaggttgaccagcagtgcatccggcttgaccaggaacggcttgttctcgtcattgccgtcgtcattgaattcgggcaactgcggttggttgaagaagctgcggtcgagcaccaggtcgccggtgacttgctgcacgccgttggcgcgcaggtcgcgcatcagcagccagagtttttccatgttcagcttggggtcgccgccgcccttgaggtagaggttaccgtgcagcacgccaccgctgagggtgccgtcagtgtagaactcggttttccactggtggttggggccgagcatttccagagcggcgtaggtggtgaccagtttcatggtggaggccgggttcaccgagacgtcggcgttgaacacggtcggcgtgccggggccggtgagaggaagcatcaccagagacagcgaggtattgggaatcttggctttctgaagcgcctgctgaacattcggcggcagggtgttgttgatcggggcggcggtgacggaaaaggccagtggcaacaaaacgctggcaagcagaaatggacgcaaagatttgatcataaggaataaaaccctactgctgagaagggtgaaaaaggcgaggggtgtgtaagaaaatccctcattagtcatgaaagtgtcggcattatgccccaaggtggatccacttgtagctgaacgatagctggtattaagcgttttttttgccggcattgcgccgcctgtcccagagagtcgggcaatcgccgccttaaactgctaaagtgccgcccgttattacttaagaggattgttccaatggcgactaaccgttcccagcgtctgcgcaaaaaactgtgcgttgatgaatttcaagagctgggtttcgaactgaacctggacttcaaagaagacctgagtgaagaagctaccgatgctttcctcgaagcattcatcaaagaagccatggaagccaacggtctgggctatgtcggcggcgatgacttcggtctggtttgcctgcagaagcgtggctcggtcaacgaagaacagcgcgctgctgttgaaagctggctcaaaggccgcagcgagctgaaaagcgctgaagtcagcccgctgctggacgtgtggtatccggaaaagccgatcaacgcggccaagtgatacttaaaaaaacggcgacccaagggtcgccgtttttttatgccttgcgccagttcagaatcagcagcgtcaacacccccgccacaatcccccagaacgccgacccgatggaaaacagcgtcaagcctgacgcggtgaccataaaggtgatcagcgccgcttcccgttccttcggctcattcatggcgatgctcaggccattgatgatcgagccaaacaacgccagggctgcaatcgacagcaccagctccttgggcagggctgcgaacaatgctgccagggtggcgccaaacacaccggcaatcccgtaaaacaccccgcaccacaccgctgcggtatagcgcttgttacggtcttcatgggcatgcggcccggtgcagatggccgcgctgattgctgccaggttgataccgtgggagccaagcggcgccagcaccagcgaggccaggccggtcgcagtaattaaaggcgaggcgggcacgttgtaaccgtcggcacgcaacacggcgacgccgggcatgttctgcgaggtcatcgccaccacgaacagcgggatgccgatgctgatggtcgccgccagcgagaaatgcggggtggtccacaccggtgtcgccacttccaggtgaaagccgctgaaatccagcaaccccatcagcccggacagcactgtgccgatgatcagcgcagctaaaaccgcatagcgtggcgacaagcgcttgataatcaggtaggtgaaaaacatccccaacaccaggccggtacggtgttgcgcggcgacgaaaatctcgctgccgatcttgaacagaatccctgccagcagcgcggcggcgagtgacgccgggatgcgtttgaccagtttttcaaagctgccggtcagcccgcacagagtcaccagtaccgcgcaggtgatgtaggcgccgatggcttcgccgtaactcacgccaccgaggctggtgatcaacaacgccgcccccggcgtggaccaggcaatggtgatgggcgtgcgatagcgcagggacaagccaatgctgcacaccgccatgccgatggagattgcccagatccacgaagaaatctgcgccgtggtcaaaccggccgcctggccggcctggaacatcagcaccagggagctggtgtagccggtcatcatggcgatgaaaccggcaaccacggccgacgcagacgtatcggccaacgggcgcaaaggcgcttgggtagcatcgttcatgcaaaggtgttcctttttacctgagagggtgcgggatcaagcctaaacttaaacgtaacaacccattgcaatacagccggggctgcaaatagccgtacagtgtgttggcgcattcggttgtgtacaatgtgccctgtttttaggtgatacttgccagcaacctgttgttgcagtattaccgttaattcgccgccgttctccaaacccgagtgcccatgaacgaacagttgcaacctctcaagaaacaaccgcgagccggcaaggccggacgcagcggaacccaggacgatatcgtctacgcgcatatcttcgaggcgatcctcgaacaacgcctggcacccggcaccaaattgagtgaagaggcactgggcgaaatcttcggcgtgagccgcaccatcattcgtcgcgcgctgtcgcgcctggcccatgaaggcgtggtgttgctgcggcccaaccgtggtgcggtggtggcaagcccgagcgtggaagaagcgcgccaggtgttcctggcccgtcgcttggttgagcgggcgattacggagttggcggtacaacacgctacagccgagcagttggccgagttgcgccagatggtcaacgatgagcgtgacagcttttcacggggtgaccgcggcgccggcatccgcctttccggcgaattccacctgaaactggccgaagcggcgaagaacgcgccgttgatcagtttccagcgcagcctggtgtctcagacttcattgatcatcgctcagtacgaaagcggcaaccgctcgcactgttcctacgatgaacacacccagttgatcgacgcgatcgaagcccgcgatgcggcgctggcggtgaacttgatgatgcatcacatggatcacatcgacagcaagctcaaccttgatgaagagagcgcgtcggatgatttgcatgcggtgttttcgcatttgttgcagaccaagaagccggggcgctcttcgatcaaactctgaccccaataaaaatgtgggagctgggcttgtgtgggagctggcttgcctgcgatgcagacacctcggtctttcagttagaccaaggtgatgccatcgcaggcaagccagctcccacaaaaggcccgctcccacatttgttttgtggtgtttgttggattagcgctggtgcaccaactgccccgccgcatacgtctgcaacaccgtccggtcatcccccagcgtcatcagcacaaacaacgtctcggcaatgttcttcgcttgcttcaagcgatagctcagcagtggcgtggcgttgtaatccagtaccaaaaagtctgcatccgtgcccggctgcaacgtaccgatcttgtcttccagccgcagcgcccgcgcgccgcccagtgtcgccagatacagcgacttgaacgggctcaaccgcgcgccctgcaactgcatcaccttgtacgcttcgttcaaggtttgcagcagcgaaaagctggtgccgccgcccacgtcggtgcccaggcccacattcaatttgtgcttctcggccatcggcaagttgaacaacccgctgcccaggaagaagttcgacgtcgggcagaacgccactgccgaaccggtctcggccagccgcgcgcactcgtcgtcacacaggtgtacgccgtgggcaaacaccgagcgttcgcccagcagtttgtagtggtcgtacacgtccaggtagcccttgcgctccgggaacagctctttcacccactcgacttcctgcttgttctcactgatgtgagtctgcatgtagaggtccgggtattcgcccagcaattgcccggcgagttccagttgctcaggtgtgctggtcggggcgaaacgcggggtgaccgcatagtgcaggcggcctttgccgtgccagcgctcgatcagcgccttgctttgctggtaaccggattcggcggtgtcggtaaggtagtccggcgcgttgcggtccatcatcaccttgccggcgatcatgcgcaggtcgagcttctcggcggcttcgaagaacgcattcaccgactgcgggtgcacgctgccgaagaccagtgcggtggtggtgccgttgcgcagcagttccttgatgaaaatatccgcgacttcttcagcgtgcgccttgtcggcgaactggctttcgcacgggaaggtgtaggtgttcagccaatccagcaactgctcgccgtaggcgccgaccatgccggtttgcggcaagtggatatgggtgtcgatcaagcccggggtgatcagcgcgtcctgatagtgggtgatgtcaatatcggcaggcaagctcggcagcaagtcgccggcatggccaacagcgctgatttgcccgttttcgatgaccagcaggccgtcttcgaaatactcgtaggaggcttcgatccccacttcagcagggtcggcgatgctgtgcagaatggcggcacggtaggctttgcgagtcaaaggcatggtcgtctcaattcaaatggcttggctgcgacgtgaagccggcagcagtttggcaatgggttcggcgctcgcagtgtgctggccgaaattcgcgttataggtggcgatgatttcgccggcgatggagatggcgatctccaccggcaatttgcccttcacctcggtgaggcccatggggcagcgcatgcgttgcagttgcgcggtgtcaaagccgcggtcgcgcaggcggtgttcgaacttgacgcgtttggtcttggagccgatcaggccgaggtagctaaagtcacctcgtttgagcagggcggcggtgagttccaggtccagcgcgtgattatgggtcatgacgatgcagtaactgcccgccggcaggtcggcaatttcgtcgaccggctcttcgctgacgattttacgcacgccctgggggatgtgttccggaaactcctggtcgcgcgaatcaatccagcgcactcggcacggcagactcgccagcagcggcaccagcgcacggccgacatggcctgcgccaaacaccgcaatctgcgcttgcacctggcccatgggttcgaacagcaacaccgtcacgccgccgcagcactggcccaggctggcgccgaggctgaagcgctccagatgggtattctgctggccacgcacgagcatgtcgcgggcgatctgcatggccttgtattccaggtgcccgccgccgatggtgtcgaaggtctgcgcggcgctgatcaccatcttcgaaccggcgttgcgcggcgtggagccgagctcttcgatgatggtcaccagtacgcagggttcgccgcggttttgcaggtcggcgagggcgctgatccagtaattcatagtcacctcttgtggtgtctgggagggcctcatcgcgggcaagcccgctcccacatttgaatgtattcacagatcaaaaggtgggagctggcttgcctgcgatggcagcacctcggtctaaagcgaagccatctcggtttcagtctcaacagccttcgccgcctgcaactgccgcatctgctcacacccccacaacactcgctccggcgtcgccggcgcatcaatctttggctgatggcgatagtcgcccaggctcgccaccgcatccttgatcgcgcaccacgaggcaatcccgagcatgaacggcggctcgcccacggccttggaatggaacaccgtgtcttccgggttcttgcggttttccaccagcttcacgcgcaggtccagcggcatgtccgccacggccgggatcttgtagctggccgggccgttggtcatcagcttgcctttgttgttccacaccagctcttccatggtcagccagcccatgccctggataaagccgccttccacctggccaatgtcgatggccgggttcagcgaggcgccgacgtcgtgaagaatgtcggtacgcagcatcttgtattcaccggtcagggtgtcgacgatcacttcgcagcaggccgcgccaaaggcgaagtagtagaacggccgaccgcgtgactggctgcggtcatagaagattttcggggttttgtagaaaccggtgctcgagagtgagacctgggcgaaatacgcctgctggatcaaggcctcaaacgtcagaatctgatcgcgtacccgcacgtgaccgttatggaattccacatccgcttcgctcacgtcgtacttgcgtgcggcaaattccaccaggcgctgcttgatggtttcggcggcattctgcgccgccttaccgttcaggtcggcaccgctggaagcggcggtcggcgaggtgttgggcaccttgtcggtgttggtcgcggtgatctgtacgcggtcgatatccacctggaacacttcggccaccacctgcgcaaccttggtgttcaagccctggcccatctcggtaccgccgtggttcaggtggatactgccgtcggtgtagatgtggatcagcgcaccggcctggttaaggaagctggcggtaaacgaaataccgaacttcaccggggtcagcgccaggccttttttcaggatcgggctgtgggcgttgtacaggcggatcgcttcgcggcgctcggcgtattggctgctggcttccagctcggcggtcatttcttcgagcatgttgtgctcgacggtctggaagtagtgggtgacgttgcgctcggtcttgccgtagtagttggccttgcgcaccgccagcgggtccagcgccaggtggcgggcgatggcgtccatcacttcttcgatggcaaccatgccctgcgggccgccgaagcctcgataggcggtgttggacgcggtgttggtcttgcagcggtggccgttgaccgtggcgtcgcccaggtaatacgagttgtcggagtggaacatcgcgcggtcgacaatcgagttcgacaggtcgggcgagcagccgcagttgccggccagttccaggttgatgccgtgcaggcggccggtgtcgtcaaaacccacgtcgtattcgatatagaaggggtggcgtttgccggtcatcagcatgtcttcgacgcgcggcaggcgcatcttggtcggctggccggtgaggcgtgctaccaccgcgcacaggcaggcggggctggcggcctgggtttccttgccaccgaagccgccgcccatgcggcgcatgtccacgacgatcttgttcatcgacacgtccagcacttcagccaccagtttctgcacttcggtggggttctgcgtggagcaataaacgatcatgccgccgtcttcggtgggcatcaccgaggagatttggggttccaggtagaagtgttcctggccgccaatgtgcagggtgccctggatgcggtttttcgccgtcgccagtgcaccggccgagtcgccgcgttggtgggtgtggctgtcgagcacgaagtgctttttacggaaggcctcgaccacatcgagtacgggttcgaggtcttcgtattcgatgacggcagccatcgccgccttgcgcgcggtttccagatcgcgggctgcaaccgccaagaccacctggccgacgaactgcacggtgtcgatggccagcagcgggtcgcccggcatcagcgggccgatgtctttcaggccgggcacgtcttcgtgggtgatggcgatgcgcacgccttcaaaggcgtagcagggcgcggtgtcgatgctgatgatgcgcgcgtgggcacggtcggacatgcgcgcatacaggtgcagttgattcgggaattccaggcggtcatcgatgtactgtgcttcaccggacacatgcttggcggcgctgtcgtgcttgacgctgcggcccacaccggaggtgaggtcctgtgcgaacagctcggcgagttcggcctgggtttttaccacggcgtgatggttagacataagcggtcacccgagtctcgatgtgcggtgtttgcagttcgatgaagtacttgcgcagcaggttctgtgcgctgagcaggcgatattccttgctggcgcggaagtccgacagcggggtgaaatcctgggccagggcggcgcaggctttctcgacagtggcggcgttccaggtcgcgccgatcagcacggtttcgcagtttttggcacgtttgggcgtggcagccatgccgccgaaggccacgcgggcatcgctgattacaccgttgtcgagcttcaggttgaatgcggcgcagacggcggaaatgtcatcgtccaggcgtttggacaccttgtaggcacggaacagcgcatggcccttgggcacgatgatcttctcgatgaattcgctgtcctggcgcgcggtaacgcggtagtcgatgaaatagtcttccagcgccagcgtgcgccgggtgttgcccttgcacagcacgatttgcgcgccgagggcgatcagcaggggcggtgaatcgccaatcggcgaggcgttgccgatgttgccgccgagggtgccctggttgcggatttgcagcgaggcgaagcggtgcagcagttcgccgaagtccgggtattcgtggtgcagcgcggtgtagcagtcggagagggcggtggcggcgccgatttccaggcgatcgtcgaaggcctcgatgcgcttcatttcttcaatgttgcccacgtagatcatcaccggcagcgtgcggtggaactgcgtgacttccagcgccaggtcggtgccgccggccaacaggcgggcttgcgggtaggcgtcgtagaggtcggccaggtcggcgacggtgagcgggacgaggcagcgtttgtcgccgctgttgagttcaccggtttgcgtcggcgcgatggctttgagctgggcgatggtttcggcctgacggctgtcgaactggtcctgaggcttgttgcagcaggcctgctcggcggcggcgagaatcgggcgataaccggtgcagcggcacaggttgccggccagggcttcatgggctttctggctgtcgggggcgtcgctgtttttttgcaacgcgaacaacgacatcacgaaaccaggcgtacaaaagccgcattgcgagccgtggcactcgaccatggcctgttgcacgctgtgcagttggccctggtgcttgaggtcttcgacgctgatcaactgcttgccgtgcaacgacgacacaaacgtcaggcaggagttgaggctgcggtagcgaatctgctccgcgcctttttcatcggtgtgcaactcgccgaccaccacggtgcatgcaccgcaatcgccgctggcgcagccttccttggtgccggatttgcccaggtgctcgcgcaagtaattgagcacggtcaggttagggtccagggcgtgctcgctacggagttccctgttaagtaaaaactggatcacggaaggcctcgcagactcattattgttgttaaccgctttgcgccgaatctagtcatgtctgacttttcggtcaatgattttctgaccagaaggtcaagaaattgcagttacaacctattcaattatggttcagtcttctggaactggcgttttcaggggcttctggcttttaatcgctgcgtgtttcatgccaaattcgcccccgtgggcccagcgccatcaggcagcatttgcgctacactgccgcgcttgtgccgatagaagattttgaagggtaaacatgacgttcaaggcgccggacagtctcgccgagcaaattgctcaccacctcgccgaacgtatcattcgcggcgatctcaagcctggggagcggatccaggagcagaaggtcacgctggcactcaacgtcagccgtggttccgtgcgtgaagccttgctgatcctcgaacgccgccacctgatcgcgatcctgccgcgccgtggcgcccacgtcaccgaactcaccgcgcacaaggtgcagagcctgtgcacgttgatgggcgagttgtacattctgctcggcaatgcggttgccgaaggctggcagacccaggccgacatgacgccgttcctgcagatccagcaacgcctgatcgccagtttcgagcgccaggacatccgcgcctttgtcgaagaaagcttcaatgtgatgcgcgccgcgtaccccttcgccgacaacccgtatttgcaagaaaccatcgataatctgcagccggcgatgaaccgcgcctattacctggcgctggaccaacgcaaagcgtccatgagcgagtacctggaattgttcgagcaactgctcggcgccgtgctggcccgtgacttgccgcaaattcgtcaagtgttgtcggcttacggccagcgcagttgctcgctggtcatcgctgcgttggcggacgcctaagcgtgcggctcaagtgcatcaaactggcggggttcaaatccttcgtcgacccgaccacggtgaacttccccagtaacatggcggcggtggtcgggcccaacggttgcggcaagtcgaacatcatcgacgccgtgcgctgggtgatgggcgagagctcggcaaaaaacctgcgtggcgagtcgatgacggacgtcatcttcaacggctccaccagccgcaagccggtgagccaggccagcattgagctggtgttcgacaactctgacggcaccctggtcggcgagtacgcggcctacgcggaaatctcgattcgccgcaaagtgacccgcgacagccaaaacagctacttcctcaacggcaccaagtgccgtcgccgcgacattaccgacatcttcctcggcaccggcctgggcccgcgcagttactcgatcatcgagcagggcatgatctccaagctgatcgaagccaagcccgaagacctgcgcaactttattgaagaagcggccggcatttccaagtacaaggaacgccgccgcgaaactgaaaaccgtatccgccgcacccacgaaaacctcgcccgcctgaccgacctgcgcgaagagctggagcgtcaacttgaacgcctgcaccgccaggcccaggccgccgagaagtatcaggaatacaagggcgaagagcgccagctcaaggcgcaactgtcggccctgcgctggcaggcgctgaatgaccaggtgggccagcgcgaagcgatcatcggcacccaggaaatcagttttgaagccctggtggccgagcaacgcaatgccgatgccagcatcgagcgcttgcgtgacggccaccatgacctgtccgagcgcttcaatctggtgcagggccgcttctattccgtgggtggcgacatcgcccgcgtcgagcaaagcatccagcacggccagcagcgcctgcgccagttgcaggatgatttgaaggaagccgaacgcgcgcggctggaaaccgaatcccacctgggccacgaccgcaccttgctgctgaccctcggcgaagagctggacatgctcacccccgagcaggaaatcaccagcgccgccgccgaagaggctgccgccgcgctggaagaatccgaaaccaccatgcacggctggcaggagcagtgggacacgttcaacctgcgatccgccgagccacgccgccaggccgaagtgcagcagtcgcgtatccagcagctggaaaccagcatggagcgcttggctgaacgccagcgccggatgcaggaagagcgcgcgttgctcgccgccgacccggaagatgcggcgatcatggagctgagcgagcaactggccgaaagcgaaatgacgctggaagacctggaagccagcgaagaacagcaagtggagcgcctggagcaactgcgccagcaactgcaacaggcgacccaggcgcagcaacaggcccagggcgatttgcagcgactcaacggtcgactggcctcgctggaagccttgcagcaggcggccttggaccctggcaccggcacggctgagtggctgcgtgatcagcatctggctgagcgcccgcgcctggccgaaggtttgaaggtagaagccggttgggagctggcagtggaaaccgtgctcggcgcggacctgcaagcggtgctggtggacgattttggcggtttcgacctggccgggtttgcccaaggcgatctgcgtttgctcagccccgccgccgacggcacgcgggtgccgggaagcttgctggataaagtcgaggccgcgattgatttgtcaccgtggttgggccaggtcaaaccggttgagtcgcttgaacaggcacttgcgcagcgtggccagttggccgccggtgaaagcctgatcagccgcgacggctattgggtcggccgccacttcttgcgcgtacgccgtgccagtgaagccgaaagcggcgtgttggcccgtggccaggagatcgtcaacctgatcgccgagcgcgaagagcgcgaagccacgctggaaagcctggaaaccgaactacaaaccctgcgcgccacccagcgccagcaagagaccggccgcgaacacctgcgccgtctgttgcaggacgaggcgcgtcagcaaggcgaattgaaagcccagctatcggcgagcaaggccaaggtcgaacagttgaccctgcgccgcacccgccttgatgaagaagtcgccgagatgggcgagcaacgtgcgctggagcacgaacaaatcggcgaagcgcgcctgcaattgcaggaagccctcgacagcatggcgctggacaccgaacagcgtgaactgttgctggcccagcgcgacagcctgcgcgagcgccttgaccgcgtgcgtcaggaagcccgtcagcacaaggaccacgcccaccaattggcggtgcgcctgggttcgctgaaggctcagcataattctacggctcaggcccttgagcgcctggagatgcagtccgagcgcctgactgaaaaacgcgagcaactgagcctcaacctggaggagggggaagccccgctcgaagagttgcgcctcaagcttgaggaactgctcgacaagcgcatgaccgtcgatgaagaactcaagaccgcgcagatcgccctggaagatgccgaccgcgaactgcgtgatgccgaaaaacgccgcacccaggccgagcagcaatcccagctgatccgtggccagctcgaacaacagcgcatggaatggcaagccctgaccgtgcgccgcaagaccctgcaggaccagttgctggaagacggctacgccctgcacggcgtgctcaataccctgaccgcccaagccaacgagaaggaagccgaggaagaacttgagcgtattgctgcgcgtattcaacggctcggcgcgatcaacctggcggccatcgacgaataccagcagcagtccgagcgcaaacgttatctggatgcccagaacgccgacctggtcgaagccctggacaccctggaaaacgtgatccgcaagatcgacaaggaaacccgtaatcgcttcaaagatacctttgatcagattaatggtggtttacaggcgttattcccgaaagttttcggtggaggcagcgcttacttggaactgacgggcgaagatctactcgatacaggggtaacgatcatggcgcggcctccggggaagaagaacagcaccattcatttgttgtccggtggcgaaaaggcactgaccgcattggccctggtgtttgccatcttcaagttgaacccggcgccgttctgcatgctcgatgaagttgacgccccgctggatgacgctaacgttggacggtacgcgcggctggttaaagagatgtcccagaccgtgcagttcatctatatcacccacaacaagatcgccatggaaatggccgatcaactgatgggtgtgacgatgcatgaaccgggctgttcgcgtctggtcgcggtggacgtggaagaagcgatggcgatggtggaatcctgaaccgggctttgaaagagaatttccggcaggatgcagggtaaatgacccggctgtgaaatatggcaaatggacatatttgttcaaggcattttgacagacggtgtaaagttatctttggtcgtgctagtttaatgtcaaattttcgtatgcgtgggcaaaacgtcagtcagaacatagagttggcgccacgttttaaagcggtttggatgttgctaaaccccttatttttcagcattttttattagaggcacgggattacatggaaatcggtctgcgcgagtggctgatcgtcatcggcattattgtcattgccggtattctttttgatggctggcgccgcatgcgcggtggcaagggcaagctcaaattccgtctggaccgcaacctgtccaacttgcctgacgacgacggcagcgccgagctgctggggccgccccgtgtgctggacacccataaagaaccgcagttggacgaacacgacttgccgtcgatgagcgcgccggtgcgtgaagcccgtgaaccgtcctccaagcgtggcaagcgcaacagcgcgccggttgccgagccgcatcagggcgatttgaacctcgatgtggatgacggcccgagcttcagcagccgtgatgacgatttcccggacgaaaccccggccaagagcagtgcgccgcgccaatcggtcaacgaccaacctgctgccgaagaagtgttggtgatcagtgttatctgccgcgacgctgccggcttcaagggcccggcgttgttgcagaacattctggaaagcggcctgcgttttggcgagatggacattttccaccgccacgaaagtatggcgggtaacggcgaagtgctgttctccatggccaatgcggtcaagccgggcacctttgatctggacgatatcgacctgttcagcacgccggcggtgagcttcttcctcggtctgccaggcccgcgtcatccgaaacaagcgttcgacgtgatggtggcggccgcgcgcaagctgtcccaggaactcaatggcgagctcaaggacgaccaacgcagcgtcctgaccgcccagacgattgaacattaccgtcagcgcatcgtcgagttcgagcgtcgcgccctgacacagaaacgctgaggttcgatcttaagcgttgtctgtagaatccgtgcactaacatattgagcagcttcggctgctcttttgctttatgagagaacacccatgaccgccgcccacacccgcatcctcgaactgcgcgctgaactggatcagcacaactaccgttaccacgtccttgacgagccgagcattccggacgccgagtacgaccggctgtatcacgagctcaaggcacttgaggccgagcatccggagctggtgacgcgggattcgccgacgcagcgggttggcagtgcggcgctgtcggcgttcacccaggtcaagcatgagattcccatgctcagcctcggcaacgcgtttgatgaaaccaccatgctggagtttgatcgccgggtgaccgaaggtcttgacctgccggtgggcgacctgttcggcggcggtgcggccgtggagtacagctgcgagccgaagctggacggcctggcggtcagcctgctgtatcaggatggcgagctggtacgcggcgccacccgtggcgacggcaccaccggcgaagacatcagcgtcaacgtgcgcacggtgcgcaatatcccgttgaaactgcacggcagcggctggccggcgaccctggaagtgcgcggcgaagtgttcatgtccaaggccggtttcgagcgcctgaatgccgcgcagctggaagtcggtggcaagaccttcgccaacccgcgcaacgccgctgccggcagcctgcgccagctggactcgaagatcaccgccagccgcccgttggaattctgctgctatggtgtgaccaccgatatcagcgacagccatatcggcaacctgcaacagctaaagaaatggggcatgcccatcagccacgagctgaagctggccaaggggattgcggattgcctggactactaccgtgatattggcgagcggcgtaacagcctgccgtatgagatcgacggcgtggtgttcaaggtcaacagcattgcgtcccagcgtgagctgggctttcgtgcccgtgaaccacgctgggctatcgcgcataaattcccggccatggaagagctgaccgaactgctcgacgtggagttccaggtcggccgtaccggcgctgtgaccccggtggcgcgcctgaagccggtgaaggtggccggtgtgaccgtttccaatgccaccctgcacaacatggatgaagtggcgcgcctgggcgtgatgatcggcgacaccgtgatcatccgccgcgccggtgatgtgattccgcaggtggtgtcggtggtgcttgagcgccgccccgagactgcccgtgccgtgcctgttcccgagacctgcccggtctgcggttcccatgtggagcgtacgcaattggtcaagcgcagcaagggcaaggaaaccgtcagcgaaggcgcggtgtaccgctgcgtcgggcgcctggcctgtggtgcgcaactcaagcaagcgatcattcactttgtttcgcgccgcgccatggacatcgacggcctgggcgacaagaccatcgagcagttggtggatgaaaaactcatcggctcgccggcggacctctacaagctcaagtacgagcagatcatcgacctggaaggctttgccgatatctccagcaagaagttgattaccgccatcgaaaacagcaagacgccgaccctggcgcggtttatctacgcattgggcattcccgatgtcggcgaggagacggccaaggtgttggcgcgttcgctggcctcgcttgagcgggtgcagaaggccttgcccgaagtgctgacctacctgccggacgtgggtctggaagtggcgcacgagattcacagcttctttgaagacagccataacaaagaagtgattaaagaccttctgtccaaggacacatgtggccttgaactgcaggaacagggcgatctgagtgccgaatttgctgcctgcactacgttgggcggctttttggacaaactacatattccttctgtcgggccgggtgctgcgcaaaagctggccgataaattcaagtctctggagctgttgataggtgctcaaaggtttgatatccgcgaagtgctgcctgaaaagcaaaccaagacagttagagatttttttgataacgaggaaaatgctaagcgagcccttgatattgagaaacagctcaaggacttcggcatgcattgggacagcgaaaagaaagtcgtcgaaggtttgccggaagccggccacacctgggtgctgaccggctccctggaactgatgagccgcgacgtggccaaggacaagctcgaaagccttggcgccaaggtagcaggctctgtttcggcgaaaacccactgcgtagtggcgggcccgggcgccggttcgaaactggccaaggccaccgagcttggcttgaaggtgctggacgaagaagcctttgtcgcctttctggccacacacaacatcaccgtctgacccgatcctgtagtgagggagcttgctcccgccgggctgcgcagcagccccgtcaggaaaatgaacgatctcttcccgcagatgatctagtctctgtcatcaggggagagaccgccatgttccgctacttcgagcagctcagttcacgcatcgccgcaccgttcacggcaggctcgtcgcgcaacagcaaggtctggcagtgccgttgcgggcaatcgctgttctttcgcaacagccagtgcctggcctgctcggcgctgctgggctatcagccgcaacaaagccgcctgtcctccctgcaaccggggccggtcgccgatacctggttacaagatgacaacctcaacgccggggccttccgccgttgtgccaatctcgatacccccgccgcctgcaactggctgatccccgcccacagcaccgcgcacctgtgcgtggcgtgcagcctcaaccgcacaattcctgacctttcgatcgcggaaaaccccgagcgctggcgcaaggtggaaaccgccaaacgccgcctggtggcccaattgataggcctgggcctgcgcgtggtgcccaaaagcgtcgacgaggaaaacggcctggccttcgactttgtcggcattgatctggaaggtaacgcgcccatgacgggccacgccaacggcttgattacccttgatatcaaggaagccgacgatgcccatcgcgagaaagtccgggtgcagatgcgcgaaccctaccgaaccttgctcgggcattttcgtcacgaggtcggccattactactgggatcgtttgatcgccaatacccactggcttgagtcttttcgccgtgtttttggcgacgaacgtgccagttacgccgatgcgctcgaccagcattaccagaacggcccgcgccccgattggcaacaaacctgcgtcagcgcctacgccaccatgcatccctgggaggattgggccgagacgtgggcccattacctgcacatgatggatgccgtcgacacagcgctcggtttcggcatgagcgcccgggagatggacctggattaccagccgttcccgcccgacacgctctatgaccccgaacaccccggtggtacggcgttcctgtcattcgtcaatgcctggatcgagctggccggtatgctcaacgaactgtcgcgcagcatgggccagccggatttctacccctttgtgctgccgccggcggtcatcgccaagctgcacttcattcatctggtgatccaggaagagggtggccgggcggacgaggtagtccaggcgcaatagccgctttctgtgggagctggcttgtcgaatcgtcgcaccgctgcgatagcatcacctcgatccaactgaccgaccgcgtcgcctgcatcgcgggcaagcccggctcccacaggctgcggtgtgcgttgcaaggcagcaggcaagtgcttgaaccatcgaatgtttttaatccggaaccaacagttgtaacttccgatgagatcggtacaatggccccgcttgccgagaggcaggcgtcgttatggtgaccccatcggtccccccgcaacgattacccgtgaacctggtcagagccggaaggcagcagccacagcgggaacattgtgtgccggggtgtggctggtggggttgcctccataacgctcctccttgcagtacccctctgttccaaatcaaaatttcttgttcagtcatctgccgaccttcattgcgcagtcgatgacggctggacaacgccaagccgcctgctagcgtcaatcatgcaaatgaccccagtgctggagtagtgaagaagtgatggcactcaattcctgattaaggatgattgccatgaccagcgttcaaggtttgcccctttctatcaaggcgtccgtcggtatatcaggcaaggctgttaataaccctgccgacgtgcgcagcattcagcacctgttcaacctgatcaaatccgcgtccgatctacccctggtggaggacgggctgtccggccccaaattggtccagcgtattaccgcgtaccaggttgcccgcctgaaggctaaaaacccggatggtgtgattgatgccaatggccagacgttcaagagcctggttgaagatgcaggcaaggcaggctcggcgggccaggcgccaatcaaggctgggggcgatcaaaagcaatggctcacagaggtcacgtgtgacggtggcgtgaccctgaccgatgcagatttcaaaaacgcagccgccctgctgggtaacgggatttccgtgaacctgatcaaagcgtttgccatcgttgagtccggcgggcgttccgggttcggccccgccaaacttcccgtgattgcgtttgaagggcacaccttccgaaagtacaccgagcaacggtatgacaaggcttaccccttgctgtcgtacccttacctggtaaaagcgggcccgcaatggaaggctaacaacaaagaccaggccactgcatggcggaccctggctgatgcgttcaagctggatccggaggctgcgctgaagtcagcttcctacggcatgtttcaaatcatgggcttcaactctggcgcctgcgggtacaagaatgtcaccgattttgtcgtcgcgatgaagctcaacgccggtgagcaattgaaggcgtttgtgggtttttgcagtaagaatccggctctgatcaaagccatgaaaaacaaggactatgcgggaatggcacgtaactataacggggcagatttcggcaactacgacaaacgcatccagaaagaatacgaggcgcttgagaagaaaaaatagcggttacgctatgagtggccgtttgttgctgcgcagtgatagctgcctcacagctatcactgcatttgctggacaacccaaaaccaacttgttagcttccgccagccatttgtttcagagtatgacagtggtgctgagttgatattgaagtgctatcacctctttaactaacaaggatgtccgtcatgaaaagcctgcaagggttaccccgtcttatcagtgcttccgttggcgcgccgggtaaagcacgcaacttgcccgccgatgttcagtgcatccagtacttatttaatttgatcattcccaagatggggtttccgctggccgaaaacggcaagtgcgacggccagttggtgcagtgcatcagccagtatcagttccgtcacctgaagtacgcgcatcccgatggcgtgatcgaccctaccggccgcaccttcaacagcttgatcgaagaagcggtgaaggtaccggtgaaagcctttccgacgatgcgcatcccgagctttctcaatgtgtttggcaataacaatggcgacgctgtgcaggccacggtcaatgtgtacctggaccgtatgcgcgcgatggtcgaggccgagcggcgcaaccgtcagttgatgctgcaggccacgtgtgacgggggtatgacccttaccgataccgatttccagaacgctgccacacaattgggcagcggcatttcggtgaacatcatcaaggccttcgccactgtggagtctggcgggcgctcagggtttggcccggccaaattgccggtgatcgcctttgaagggcacctgtttcgcaagtacaccaagcacatttatgatcaggcgcacccgctgctgtcgtatccctatgtgaaaaaagccgggccgcagtggcaggccaacaacaaggaccagaccaaagcctgggaaaccatggccaccgcctttgcgctggaccaggaggcggcattgatgtcggcatcctggggtatgtttcagatcatggggttcaactttacgtcgtgtggttacaaaaccgtgtttgaattcgccgcggcactcaaggttaatgccggcaatcaacttaaggcttttgtcggtttttgcagtcaaagtccggctttgattaaagccatgaaagataaagattatgtcgccatggcgcgcaactataacggcaaggattatggcgactatgacaaccgaatcaaaaaggcctacgaggcacttgaagggaaaaaataagatgacgcgttttctggcagtgggtgtgttgtcgttgtgctctattacgccagcattcgcaggcgaaacaaccttgctttcaggcaagtacgaagggttgatgctggcggtgacgccggagcatcaggttgaaggttattacgctgaggcgctgggcgagggcgtaacccgcagttgcgcgttttacctgcaaggcgagccgcaagcgctgaccacctggctggatgagtcctaccccggcagtgtggcgccgtcgtccgatggcgtgaccctgaccgtggagcagggccgtcagcacccgggttgcatgagcgtgttgatgccggaaatcgccacgggtctggagctgactcagactgccaagacgcaatggatcggcctggtgactgtctcggccgacaaggcttacctgcgcaaggagcctggttccgatgtggccaagcagccgtacatcgtcaaggatgatgtggtgggggtgctggcgttcaaggacggctgggctcacgtcgagttcaccaacgccaaggaccacacctacaccggctggatcggccaggacgagtacagccgcctttctgcgcctgcagcggcgaactgaagcaaacaaaaacgccgcaacgtgtcagccacgttgcggcgtttttttgtgcccgtaatcaggccttgttgcggttgaacagcttgcggaccacagcgaccagcgccaccacgccgaccaccaggaacttcttcatggccagcaggaaaatgccgatcttggcgaacaacccggccttggcggcaataccaccggccaccagcgcggcaaggccgtaagcggcggctttgtcggtgcttgggttgaagtcggtgtagaggttgccgtcggtgaagttggtaaacgccaataccttgggcagttcctgcttgatggtcgccaggtcgctcatggcggcaacggcgttgagttccagcacgccttcacggcccagcacgcggatgctgtagttgagggtggtttgctgggcgtcatcggctttcagctcacgggcccagtacattttgtgagtggcttcgtcgtaatgcggcggctcggcccagcccagcaggtgcaggccggaataaccctgtttcttgcgctcggcgttggaggtttcgtcttcttcctgcatctgcttgagcagttcggcgtagtcgattttcgccgcatcgtcgtcggaaatgtgcccgtcattcttgtagctgacaatcacgccccaaccgcgttccgacagcgggctgaccgccttcggcacgatcatgcccagggtcttgaagcccggcgggttgccccagccatcggtgagcaggcgctcggtgtcagcggggttgaggtagtagaactcgtcgttgagtttgagggttgcaatgccggtgggcagggtgaccgtgccggtttgctgcttgagcgaggcaaggaagtgctcaggcgtttcggcgggcgcactggcttcaacaggcgttggcgcaggtgtggaagcggccaggaccggggtggcaggcaggctcaaggcggccgccgccattagggcgcggaagtaattcatggtagtcccttacattttgaattaatttcgcgggaggataactgaaatataatgttaccagctagccgaaagtctcccgcagcagcccggcaaatgcgtcccgcgccaggtgccgctgggtgtctttgtgccagaacagcaagttgtcgacggcctgcagttcctcgaagcgatacgacgccagttgattggcttgctcatagcgcgccaggatgccctccggcgccaacgccacaccaatcccggcactgacacagccgatgatggtgccccagctggcatagctggcgatgctcggtttgaagtcgtggggcttgacccagttttccagcgccgcgcggtaggggcagccgggtggccataccagtaaagtgcgccccgccaagtcaccggcactgttgataggctcactggacgcgctggcgatcagcaccaggcgctcgctgtagaccacgctgtggtcaagcttggcgcgtttgccgcctgccgccaccagagcgacgtcaaggcggtggtgttgtacgtcatccagcaattcggcccaggcgccggtcaccagttccaggctgacgtcggggtagcgccggtggtattcggccagcagcggcggcaggcggccactggcgctggattccaccgcgccgatgcgcagggtgccacggggaatggcgctggcatctactgcgcgcttggattcatccaccagcgccaggatgcgctcgcagtaatcgaggaagatctccccggcggcactgatcgccagcccacgccccgcgcggataaacagtggcgtgcccaactcgctttccagctgtttgatgcgtgtggtgatgttggacggcacgcagtgcagttgcagcgcggcctgggccacgctgccggtttgcgccacggctcgcaccattttcagttgggccagttccattgctcagttccagtgatttcagaagtcagaaaggcttaattgtcctgcgccttgcgtgggcgaagactgacggcactccttcccggtttccgagtgccgttgatgaataccccttcacctctaaagcttacgctagtcatcgccggcgtcatcctctgctgggcgtattcgccgattggcgtgcacatggggctgcacagctacagccccggccagttggcgttgttgcgattcctgattgcctcggtgttcatgggaggcgtggcgctggtggcgggtatcggccggccgcagttgcgcgatgtgccgtggctgctggtgctgggttttttcggcgttttcctgcatcacaccagcctgaataacggacagcagtgggtcacggctgcggcgtccagtgtgttggcgcagtcggcgccgttgttcagcgtgttgattgcgtttttttgcttgaaggagcgcgtcagccggtggcgctggagttgcgtgctgcttgggttgatcggcgtgctggtggtgatctggggcgatcacggcgtaggggatatcgacccgcgcgggttgctgatcctgctggccgcgctgtcgtggagtgtgtacttcgccatccagaagcactacgcccaccgttacagcccgctgaccatggcgtgctatatggtctggtccggcaccttgatgctctgcgtgaactggccaggcctgccggctgccgtgatgcaggcgccgctgccggaaaacctgtcagtgctggtgctggggatattcccgagcgccctggcgtacctggcgtggggctttgtgttgaaacatgtggacgtcagccgcgcatcggtggcgatgtaccttattccaccggtggccatgctgatggccgccacgctgctgggcgaacacgtcactgtgcaggtgatgctcggcgcggtgatcgtgctggcgagcgtggcggccatcagcctggaagggcgctggcggtcactcgctcaggctgaacgcgcgcaaccggtggccgtcaaggtcctcggcgacaaaggtgtagccgaaatccagggtggtcggtgattgaatgatcgttgcgccgcgctctacccacagatcgtgcaacgcatcgatggcggcgttgtcgggcagcgagaagccgacttcaccgccgccgccggtcattttcgcggcgggctccacggtatggcgcgaccacagccccagcttcacgccgttgtcgaggatgaacagggcgaacgtcgggttcagttccaccggcggcttgcccagcaggcggctgtagaaattggcactggtggcggggctatcaacgtacagcaggaagtaatgggcgacggagttcatgcactctccttgagggcattgggggatgaggtgcccagtctaaaagcaggtgctgtcaatttctgtcaggagtgtgcagcggatatgcactttcaccggtgtagagtttgatgagatcgtcgatttcgcccgacatcctcatgcgcagcagcgtacgcaggatttgctgcaccggtacgttcgggtcgttacgcaccatgcagcccaggctctgctcgtcgattacggcgaccttgtgcagtttttttccgggtggcaggcccaggttgaagcggtccagtatccattcattgatgacggcatacttgaagcgcccggcaaccagcttgtgcagcaccaggtcttcgctgcgcgaatcgtcgcgcgtgagttggccgctggccaacagtgggtcaaggatcgcatagcggtagttgagcactgtaccgattgattgcgctgccagcgcctctacgtgcaccggctgtggcgccgtgtggcggctggccattacgttgcgttgtaccatgagcggcacgctccaggtgtagtcgccggacaaatcgtcgagccagccttgggcgacataacagcgcacatcgatgtcgccgtgctccatggcattggcgatgcgcgcccggggcagcacatgaaactcggcagggtgcccaacctgcgtggccaggctcagcatcaggtcatacaagatgccctgggtaggctggtcatcttccagctgggccatgggcatcgcccagctgtcggaaaccgcgaagcgcaacggcgcaggtgccgcgaggcaggtgacgcaaatcatccataaagcgcccaggactacgcgcatacactctccgggttcaggcctttgcggggccaaccaggtgagcttagtcagattagacgagcgtgccggatgcaatttcccccttgctccgctagcattaccggcttccgcttcccagttgcgacggttttcgatgagttatcaggttcttgcacgtaaatggcgtccgcgctcgttccgcgaaatggtcggccagacccatgtgctcaaggctctgatcaatgccttggacagccagcggctgcaccacgcctacctgttcaccggtacgcggggtgtgggcaagaccaccattgcgcgcatcattgccaaatgcctgaactgtgaaaccggtatcacttccacgccttgcggcacctgctcggtgtgccgggaaatcgacgaggggcgttttgtcgacctgatcgagatcgacgccgcgagccgcaccaaggtcgaagacacccgcgagctgctcgacaatgtgcagtacgcgccgagccgcggccgcttcaaggtctacctgatcgacgaagtgcacatgctgtccagccattccttcaatgcgctgttgaaaaccctggaagagccgccgccctacgtcaaattcatcctggcgaccactgacccgcagaaacttcctgcaacgattttgtcgcggtgcctgcagttctccctgaaaaacatgacccccgagcgtgtggtcgagcatttgacccacgtgctgggcgttgaaaacgtaccgtttgaagacgacgcactgtggctgctcggccgcgccgccgatggttcgatgcgcgatgccatgagccttaccgaccaggccatcgccttcggtgaaggcaaggtcatggccgccgatgtgcgcgccatgctcggcaccctggaccacggccaggtgttcgatgtgctgcacgcgctgatcgaaggtgacgccaaggcattgctcgaggccgtgcgccatctgtcggagcaaggcccggactggaacggcgtgctctcggaaatcctcaacgtgctgcaccgcgtcgctatcgcccaggccctgcctgagggtgtcgacaacggccatggcgaccgcgaccgcgtgctggccctggcccaggcgctgcccgccgaagatgtgcagttctattaccagatgggcttgatcggtcgccgcgacctgcccctggcaccggacccgcgcggtggctttgaaatggtgctgctgcgaatgctggccttccggcctgcggactcggcagacgcgccgagacagccgctaaagccagtggggatcagccaggccacagttgattccgccaaaccagtggctggcgcggccgtggttgcgccagtggttgctgcgcctgtgcctgcgccggtcgcgcctgcggcgcctgagccagtaatcgccgcgcctgctgtcgagccggaaccggtcatagagcctgagccggtcgtggatctgccatggaatgatcccgtcgaggttgaggccgacgttgaactgcaacccgccgtggagcccgtactggaaaccaccggtgaacagcccgaactcacgccgatgcccacgccgaccccggatagcgtggtgccggatgcgcctgaatgggtctctgcgccagttcccgagccgacggttgcccaggttgaggccgcgacgccaggcatcgacctcgacgacgagccgccgctggacgaagactacatcgagccggacatggattcggcgtacagctacctggacgacctggccagtgaacacactgccgagccggccccggaacccgaggcggaacctgctgcggccccggccaccggcctggccctgcaatggctggagctgttcccgaaactgccgatttcgggcatgaccggcagcatcgccgccaactgcaccctgatctcgattgaaggcgaccactggctgttgcacctggacccggcccacagcgccctgttcaacgcgacccagcagcgccgtctcaatgatgcattgaaccagtaccatgagcgcacgctgaccattgccatcgagctgatcaagcccgagcaggaaaccccggctcaggcggcgacccgccgacgcttgcaccggcagcgcgacgccgaggattcgatccacgccgacccgctcatccagcaaatgatgcaacagttcggtgcggtcgtgcgccacgatactattgaacctgtcgacgccccggtgccccaagcgtcatgacaccgggctattaattgatccacgtacttttgaggtgattcccatgatgaaaggtggcatggccggcctgatgaagcaggcgcagcagatgcaggaaaagatggccaagatgcaggaagaactggccaacgccgaagtcaccggtaaagccggtggcgatatggtcagcgtggtgatgaccggtcgtcacgacatcaagcgcgtgagcatcgacccaagcgtattgccgggtgttggcgaagatgacctggaaatgctcgaggcgctgttcgctgcggccgtcaacgacgccgtgcgcaagatcgaagccaatagccaggaaaaaatgggcggcgtgaccgccggcatgcaactgccgccaggcatgaaactgccgttctgatccgctagccttggctagactccaatgccaggccacgtgcctggcatttttgtttgtgccaatccaatcgaaccctggcctgcctggcaaggtctgcaccctgtaccgatgaattcgataaaggagcctcctgatgcctcaagaacctgttcttaaccaacgcatcgtcctggtttcccgcccgcaaggtgcgccgacaccggaaaacttccgtctggaacgcgtgaacctgccggagctggcagacggccaagtgctgttgaaaaccctgtacctgtcccttgacccctatatgcgcgggcgcatgagcgacgcgccgtcctacgcagcgccggtggaaatcgacgaggtgatgacgggcggggctgtcagccgtatcgagcaatcacgtaatccgaaattcacagtgggcgacctggtggttggcgccaccggctggcagagccatagcatttctgacggtcgcaacctgatcccggtgccgaatggcttggccagcccgtcgatggcgctgggcgtgctcggtatgcccggcatgaccgcgtatatgggcctgatggacatcggccagccccaggccggggaaaccctggtggtggctgcagcgtccggggccgtcggctcggtggtggggcaggtggcaaaactcaagggcttgcgggtggtgggtatcgccggcggcgccgacaaatgccgttacgtagtggaagagctgggctttgatgcctgcattgaccacaagagccccgacttcgccaatgagctggcgctggcgtgcttcaagggcgtggacatctattttgaaaacgtcggcggcaaggtatttgatgcggtagtgccattgctcaaccccaaggcacggattccgctgtgcgggctgatcgcgggctacaacgcccatgaggctcctaccggcccggaccgtttgccggccttgcagcgcactttgttgaccaagcgcgtgcgcatccagggtttcatcgtgttcgacgactacggtgatcgtcagcctgaattcctcagtgcgatggcgccgtgggtgcgagacggcaagatcaagttccgcgaggatgtggtggacggcctggagcaggcgcctgaagcctttatcggtttgctcgaagggcgcaacttcggcaagttggtggtgcgcgtcgcacaggattgagcatttgacgctaatccggggcgcgggtataaaccgcgtctcgttgttttgtcggacctttccccatgagcttcagccctctgattcgccaactgatcgacgccttgcgcattctgccgggtgtaggccagaaaaccgcccagcgcatggccctgcaactgctggagcgtgaccgcagcggtggcgcccggttggcccaggccttgagccaggccatgacgggtgtgggccactgtcgtcaatgccgcaccctcaccgaggaagaactctgcccgcaatgcgccgacccgcgtcgcgacgacacattgctgtgtgtggtggaagggccgatggacgtctacgcggtggagcagaccggttatcgcgggcgctacttcgtccttaaggggcacttgtcgccgctggacggcctggggccggaagccatcggcattccgcaactggtggcgcgtattgaagagcagggctcgttcaccgaagtgatcctggccaccaacccgacggtggaaggcgaagccacggcgcattacatcgcccagttgctgagcaataaaggcctgatcacctcgcgaatcgcccacggcgtgccgctgggtggcgagctggagttggtggatggcgggacgctggcgcattcgtttgcgggccgcaagccgatcgctctctaacgggcggcacagttacaaatgtgggagcgggcttgtgtgggagccgggcttgcccgcgatgcaggcaccgaggtctatcgggcagaccgaggtgatgctatcgcaggcaagccagctcccacacaagccagctcccacatctgttttgcattaccagtgagaacttgataaccaagcaagcgcttggtaagttcgctccacctctctgtggagcttgccgatgtctgcctatcaggactacttcgaccccagccaccaattggtccgcgacagcgtgcgtcgttttgtcgagcgcgagatgttgccgggcatcgagcagtgggaagaagcaggaagctttccccgcgagctgtacctgaaggctggcgcggcgggcattctcggcatcggttaccccgaaagcctgggcggcagccatgaaggcgacctgttcgccaaggtggccgccagcgaagaactgatgcgttgcggctccggtggcgtggtggcggggctcggttcgctggatatcggcctgccgccgatcgtcaaatgggcccgccctgaggtacgcgagcgtgtggcgccgcgggtattggccggcgaaaagatcagcgcgctggcggtcaccgagcccagcggtggttccgatgtggccaacctgcaaacccgcgctgtgcgtgacggtgaccattaccgcgttagcggcagcaaaacctttatcaccagcggtatccgcgccgacttctacacggtggccgtgcgcaccggcgggccggggtttggcggcatcagcctgttgctcatcgaaaaagacaccccgggcttcaccgtcggccagcccctgaagaaaatgggctggtgggcgtcggacacggctgagttgttctttgacgattgccgggtgcccgtaggccatttgatcggcgccgagaacatgggctttgcctgcatcatgggcaacttccagagcgagcgcctggccctggccttgatggccaacatgaccgcgcaactcgcgctggaggaaagcctgaagtgggcagccgagcgcgaggcgttcggcaaacctatcggcaaattccaggtgctcaaacatcgcctggcggaaatggccacggcagtggaagtgtcacgggagttcacctatcgccaggccgcgaagatggcggcgggcaagagcgtgatcaaggagatttccatggccaagaacctggcgaccgacacggccgatcgcgtgacgtatgacgcggtgcagattctcggcggccaggggtatatgcgcggcagcctggtggagcggttgtatcgggacaaccgcattctgtcgattggcggggggacgcgggaagtgatgaatgaaatcatcagcaagcagatggggctgtgatcttgggtgttctttcgggcgctatcgcaggcaagccagctcccaccttttgatttgtgaatacattcaaaggtgggagctggcttgcctgcgatgaggccggttcaggcgactgtcatttttcagtcaacccgaattgcgtcaggcaaaacgtcggtatgcccatatcttcaaggcgctgcgacccacccagttccggcaaatcaataatcgccgctgcttcaaaaatcttcgcgcccatgcgccgcaccaggttcgccgccgcgatcagggtgccaccggtcgcaatcaggtcatcaaacatcagcaccgagtcgccttcgcacaggctgtcggcgtgcacttcgagaaacgcttcgccgtactcggtctggtaaccctcggccagcacgtcagccggcaatttgccctgtttgcggaacaggatcagcggcttgttcagctggtaggcgatgatcgaaccgatcaggaaaccccgcgcgtccatcgcgccgatatggctgaagtcggcttcgacatagcggtgggcgaaactgtcggccaccaggcgcagcgcgcggggcgactggaacagtggtgtgatgtcgcgaaagatcaccccaggcttggggaagtcgatgacagggcggatcagggatttgatgtcgaacgaatcgaaggtcatcgtcgaagagtcctggggctgaaaacggactcgaagtatacctgcggcctcgccgattggcgcggccgcaagcgtctggatcagctgtcgagggtgccgcccgccaatgcacacagctggatcgggtcgaggatatgcacctctttgccttcggcggcaatcagcgcgttctgctggaagcgggtgaacacgcgggacacggtttccaccgccaggcccaggtagttgccgatttcattgcgcgacatgctcaggcggaactggttggccgagaacccccgcgcacgaaagcgtgccgacaggttgacgaggaacgtagcaatgcgttcgtcggcggttttcttcgacagcagcagcatcatctgttggtcgtcgcgaatttcacggctcattacgcgcatcaactggcgacgcagctgtggcagttgcagggccaattcatccaggcgttcgaaggggatttcacaaacagaggtagtctccagggcctgggccgaaaccgggtgaatctcggtgtccatgccggacagcccgaccagctcgctgggcaggtggaaaccggtgatctgctcttcgccgctgtcgctcaggctgaacgtcttcaatgcacctgaacggactgcatagacggagtcaaacttgtcgccctggcgaaacagaaactcgccttttttcagtgggcggccgcgtttaacgatgtcgtccagcgcatccatgtcttccagattcaacgaaagtggcaggcagaggggggccaggctgcaatccttgcaatgagcctggctgtgagcgcgcagtttgactggctcggacatttcttaaatccttgtgggaaaacacacataagacgtaagggtaacgcacgcggggcaggtgaggccagcgtgtacaaaaaaccggcagcggtataaagctttgtgtatcgatgccgatacacaggtgaatccctatgggctggagctcaggtcatgtcggtaacacccttgaacaaccctgtcattactaccaaaataccgaagattttgacggcggctgacgcacttgcgggcaagaaggtcgacgacaagcctgcgcctccaccgacgcctggcgaaggggtggtggtgaccatctccggcgcggggatgaaagcctcccaggccggtaacaaccccaacaaggacatcgacgacagcggcctgaaagacaacatcaagcaactgttgaagatgatccgcgaactgcgtaaacagctcgccgagaagatggctcagctttcggcggccatgaacgacaccaccctgtccccggaagcgcgccaggccaaggtctccagcttgcagggggatatcgcgactatccagtccggtttgatgaccgctcagtcccaactgaccaaggcgctgaaaaatgaatcgcctgaggctcagttgaaagccatgagcctgttagcgaagtaatccgggcttaaatcacccgcgagaatcgttgccggttctggtgctccaggtacgcatcgaacaccatgcacaccgagcgcaccagcaggcgcccggccggcaatacctgaatcccccgagcatccagttcaatcaggccgtccgtggtcattgtctccagctgtggccaaacgtcggcgaaatagccgcgaaagtcgacattgaaggccttttctatgctgttgaatgacaggctgaagttgcagatcaactgctgaatcacttctcgtcgcagccgatcatcggtggtgcacaccaggccccggctggtcgccagttgcgcgcccgccagggcattttggtagtgactgaggtcgctgctgttctggcaatacagatcgccgatctggctgatcgccgagacgcccaacccgatcaaatcgcaatgcccatgggtggtgtagccctgaaaattgcgctgcagtgtgccttcttcctgagccacggccagctcgtcgtccggcagggcgaagtggtccatgccgatgtagcggtagccggcctgggtcagctgttcaatggtggtttgcagcatcagcagcttggccgccggggagggcaggtcgtcgctgttgatgcgccgctggggcataaaacgctcgggcagatgcgcatagttgaaaaccgacaggcgatccggctgcagcctgatcacttcttccactgtgcgcgcaaaattcagcggcgactgtttgggcaaaccgtagatcaggtcgatattgatcgagcgaaattgcagggtgcgcgccgcgtcgatcaccgcgcgggtttcttccaggctttgcaggcggttgaccgcgcgttgcacctcggggtcgaggtcttgcaagccgatgctgacacggttgaagcccagttcgcgcagcagccccatggttgcccagtcggcttcgcgcgggtcgatctcgatgccgtagtcgccggagtcgtcgtccagcaagttgaaatgctggcgcaggcgtttcatcacttggcgcaactcgtcgtggctgagaaaagtcggcgtgccgccgccgaagtgcaactgttccaccggctgtttggggtcgaggtggcaggccaccagctggatttcctgttccaggcgctgcaggtaggcctgggcacggccacggtctttggtgatgaccttgttgcaggcgcagtagtagcaaatgttggcgcagaacggcacgtgcacatacagcgacaacggccgcgcggccttgcggctgtcgcgcagggcgtgaagaaggtcgaaggtgccgacctggctgtcgaattgtacggcggtggggtaggacgtgtagcgcggccccgcgaggtcgtagcggtgaatcagatcagtgtcccaacgaatggcgtcgagcatgcgggcggtcccccggattggctagtggaccgagtctaggggcgcgtcacaggtggcatcttgatttgcatcaacggggagcggcgctatgccacagggcgattcaatggcccatcagccagtgctgatgggggccgggcaacgtccacagaccaaacacaatgaccagcaacccaccggccacgcgaacgctgcgtttgcgcagcacagcggtaacccgctcggcggccagcccggtagccagcagcacgggccaggtgcccaagccaaacgccagcatcaagagcgcgctgtcccacgcattgccctggctcgccgcccacaaaagggtgctgtagaccaacccgcacggcaaccagccccacagcgcacccagcagcaaggcgcgcggcaggctcgacaccggcagcaagcggttggcgacgggctggataaagcgccacaggccacgccccaggctttcgatacgggtcaggccgctccaccagcccgccaggtacaggcccatgctgatcagcaacaacccggcaagcacacgcatgaacattgccgccgggctgttggccaccgcccagcccgccaggccgatcaacaacccggcagtggcatagctgaggatgcgccccaggttgtacgccagcagcaggcgaaaacgccggctgcgttgttccttgggaatcgccagggtcagcgcgcccatcagcccgccgcacatgcccaggcaatgcccgccgccgagcaggccgaggatcagcgcggagaccagcagcggcgccagttcaagcatggggcggctctttgggcggttgttcggccagttgttcggggcggttggcttcgtcgacggcggccaggtggttggggtcctggtcatcgaacagcacgctgtgggccgggccgtcgaggtcgtcgtactggccgctgtccaccgcccagaagaagatgtagatggccacgcccaccaacaacagcgccgcgggaatcatcacgtagagagctggcatctgtactccatgcctgcgcggctcaagccggcagcgggcgggttaacaagggggcgctggcggcttgcgcgctcggcaagcgagtcaggcgcagggcgttgagcaccacggtcaacgaactgagggacatgccaatcgcagcccaaatcggcgtgacccagccgagggcggcaaacggcagcataagcccattgtacagcccggcccacagcaggttttcgatgatcacccgccgcgtgcgccgcgccagggtaaaggcttgcaccaacgcgtcgagacggttggaaagcagcacggcatcggcgctggttttcgccaggtccgtggccgagcccatggccacgctgatatcggcggcggcgagtaccggcacatcgttgacgccgtcgccgagcatcaacactttacggccttccttgtgcagctgttgcagcacctgcaacttgtcgtcggggcgcaggccgccacgggcttcgtcgatgcccagctcggcggccacgctggcgaccatcggcgaactgtcgcccgacagcagcagcgtgcgccagccgcgcgccttgcacgcggccaacagggcgggtgcgtcactgcgcaggcggtcgtcgagtacgaaccaggcgagggcaccgtcgcggtcgccgagtagcagccattgcccggcttcattgggtgaggcgggaatcgggcaaccactcaactcgcagacatagcccggctggccgatgcgcaacaggcgttcgcccacccggccttcgagccccaggccgggagaactgtgcacttcatccgcggccatcggcgcacgcccgaacgcccgggcgatcgggtgttcggagcggttttccagcgcggcaccgaggctcaggcattcatcgctgttgagcgtgcccaaagggcggatcgcgcgcagggccagccggccttcggtcaaggtgccggtcttgtcgaaaatcaccgtgtcgatctggttcaggccctccagcacgtggccgcgcgtcagcaacagaccgagtgtgtgcagggagccggtcgctgcggtgagggcggtcggcgtggcgagggacagcgcgcacgggcaggttgccaccagcatggccaggacgacccagaacgcccgcgatgcgtccagctcccaccacaccaggccaatcaccgccgctgcgagcagtgaacacaacaggaacccttgcgcggcgcggtcggcgatttgcgccaggcgcggtttctcggcctgggcgcgctccagcagacgcacgatggcagacagacgtgtgtcgtggcccaaggcacggacttcgacggtgagtgcgccttcgacgttgagcgtgcccgcggtgacgctgtcgccggcatgccgaggctgtggcaggtattcgccagtgagcagcgattcatcaatgctcgattggccctcgagaatcacgccgtctgccggcagcaccgcgccggggtgtaccagcacgcggtcacccagcgccagttcgctgagcaggatgcgttcgctttgcccgtcgctcttgaggcgcaggcacgacgccggcagcaggttgaccaactgcgcggtcgcggccgccgtgcgttcccgggcgcgacgttccaggtagcgaccggccagcaggaacagcgcaaacatgcccactgcgtcgaaatacagctcgccggagccggtgattgctgtccatatccccgccaggtacgcgccaccaatcgccagggacaccgacacgtccatggtcaggtggcgggtgcgcaggtcgcgcagggcgcctttgaaaaacggcgcgcagctgtagaacacgatgggggttgtcagaaacatcgccacccagcgcaggatcacatgcagttccgggctcaagtcgatattgaattcgggccaagtggccatggtcgccatcatcgcctggaaccacagcaagccggccacgcccagttggcgcagggccaggcggttttcgccggccagtctctcggcggcgcgatccgcctgataggggtgggcggcgtagccgatatggcgcagttcgccgagcaactggctcagtggcagttgcccgtcggcccattgcacatgcaagcggtggttggacaggttcagccgcgcctcagccacggcgggcagggcgcgcaggtgtttttcgatcagccagccgcaggccgcgcaactgatgccttccatcagcagggtggtttcggccagttcgcccgtgtggcgcacgaagggtttttgcacgtcggcgcggtcgtacagcgccagttcgtccaccagctgcaccggcaatgcttcggggttggtcgaggcttcgctgcggtgttggtaatagctttccaggccaccggctacgatggcttcggccaccgcctggcagcccgggcagcagagttcgcggcgttcgccgaggatcatggtggtgaagcggctgcctgaggggacgggcagggcgcagtggtagcagggggtggtcatgggttggaatctatggtggctgggagggcctcatcgcgggcaagcccggctcccacaggggaccgcgatccaaatgtgggagccgggcttgcccgcgatgcgcggagcgcaggctgttaacgcttcaggtcttcagccccctgcaacggctcatcgcccagcagcaaatccttgtcgtggctgacctgttcttcttcgaacatccgccaggtgcggtcgccttccacgccgagcagttccacgaagcgccggccttcgaccttgtcggtgacctggccgatatagcggccaggctcgctgtcgctgcgcgccaggttgatcttgcgatccttgcccggctgggtcggggaaatcaggttcagttccagggtggtcgggttgctgtagccggtgaggttcacctcgacctcaccggtcagttcgtccaggtgcaccttggcgcgcaattgcagggtctgggccagccgttcgcgatccagcgagcggttgatgcccttgccggcctcgtagtagttgtcgttgaccaggttgtccgggttgttcaccgcgatggtcaccatggacagggtcaaggtcaccgaacaggcgagtatcccgatgatgatccagggccagaggtgcctgtaccaggggcttgcggcagtggctgcgggcattgttttgctctctatagtcaacgaacttgggggccgatgaatcggctcttggcttcaatgtggacgctggggtcatcggcatcggtgaggatgaacttgacctcgttggtgctcgacggcatttgctccggtgcgctggataactcgaccggcatgctgatgatatcgccggccgccaccttgatctcgcggcggccttgcagtttgagatccggcaggccggcggcgtcgaggacgtaagtgtggtcgcgctggtccttgttcatgattttcaggctgtagacgttttcgatgcggccttcagcgttttcgcggtacagcacgcggtccttgctcacgtcgaaacctaccagcgggcgcatgaagaatgcggtgaccaacaggctgatcatcgccagcagcaccaaggcgtaaccgatcaggcgcgggcgcagcttatgggttttttgccctgagaggttgtgctcggtggtgtagctgatcaggccgcgcgggtattccatcttgtccatgatgttgtcgcaggcgtcgatgcacgcggcacaaccgatgcactcgatttgcaggccgtcgcggatgtcgatgccggtggggcagacctgcacgcacatcgtgcaatcgatgcagtcgcccaggccctgggccttgtagtcgataccctttttacgcgggccgcgcagctcgccacgacgggggtcgtaggagacgatcagggtgtctttgtcgaacatcacgctctggaaacgcgcgtacgggcacatgtaaatgcacacttgttcgcgcaaccagccggcgttgccgtaggtggcgagggtgaagaaaccgacccagaaatacgaccagccatcggcctggccggtgaagaaggcgaacaccagttcgcggatcggcgagaagtagccgacgaaggtcatgccggtgacaaaaccgatcaacagccacagggtgtgcttgctgagttttcgcaggaatttgttggcgcccatgggggccttgtcgagcttgatgcgctggttgcggtcgccttcggtgaccttttcgcaccacatgaaaatccacgtccacacgctttgcgggcaggtgtagccgcaccacacgcggccggcgtacacggtgatgaagaacaggccaaaggccgcgacaatgagaatgcccgagagcaggatgaaatcctgcggccagaaggtcgcgccaaaaatgaagaatttacgttccggcaggttccaccacacggcctggtggccaccccagttcagccacacggtgccgaagtagagcagaaacaaaccggcgccaccgagcatgcgcaaattgcggaacaggccggtgaaggcgcgggtgtagatcttctcgcgcgaggcgtagaggtcgacggttttggcaggcggggtaacgtcatgtaccggtatctggtcgctcatcattgcatcccacggcggtggagatttgcctcggccagtacgtgccaaccggggtcaaaacaggctgttgcagtggcgttatgatacgcctgcgttgctgctgatcgggggcgacctgcatgatctggatcaatggacttggcaagtatggccggttttggctggctcggacttcaaaacaaaggagatccaatgtgggagggggcttgcccccgatgccggtgtatcagtgacagatgagctggctgacacattgctatcgggggcaagccccctcccaccccggcctttctgtgatttcaaaagcctgataagtcttactgctcctcagcttgcttatccccatgagacaagctgtacacatacgccgccagcaagtgcaccttgtcgttaccctgcagttgttcctgcgcaggcatctggccctgacggccgtaacggatggtctgttgcagttgggcgaagctcgaaccgtagatgaacgcgcccgggtgggtcaggtcaggcgcgcccatggccggggtgcctttaccggccgggccgtggcaggccacgcagttggcggcgaagagtttcgcgccgttggccacatcggccttggcgccttccggcagcttgcggccatcgaggttggtcaccacaaacccggccacgtcggccacgccttgctcgccaatcacctcggcccaggccggcatcaccgcgtgacggcctttcatgatggtttccttgatggtcgcgggctcaccaccccagcgccagtcggcgtcggtcaggttgggaaagccataggcgcccttggcgtcggagccgtggcacaccgagcagttggaggcgaacaggcggccacccatcttcaaggcttgcgggtccttggccacttcttcaatcggcatcgaagcaaacttggcgaagatcgggccgaacttggcgtccgaacgggccatttccttttcccattcgtgcacgccggtccagccggtctggccgttggcgaaaggggtttgcttgtcgttgtcgaggtagttatagcccggcaacaagcctttccagttgcccaggccggggtacagcgccaggtaaccgagggcgaagatgatggtgccgacgaacagcatgaaccaccacttgggcagcgggttgtcgtattcctcaatgccatcgaacgagtggccgacggtctcgtccgtctgctcgctgcgctggccccgacgggtcgacagcagcagccaggtcagggcgaaaatggtacccagactgaggactgtgacgtacagactccagaacgtagtcattctttgttactcctagaagcttgctcgacgtgcttgatggcttcgggatcatccgcaaagggcagcatggttgcgtcgtcaaactccgacttgcgcttggggctgaacacccacaacgccaggccgacaaaggccaccatcaccacaacggtgcccaggcctcgaatcatcccgatatccatgaagatcaccgtttgcttttgatgagggtgcccaggccttgcaggtaggccaccaatgcgtccatttcggtcttgcccttcacggccgcggccgcaccggcgatgtcttcatcggtgtagggcacgcccagggtgcgcaagacttcgagtttcttcgcggtgtccttgccgtcgagcttgttttccacgaggaacgggtacgccggcattttcgattcaggcaccacgttgcgcgggttgtagaggtgcgcgcgctgccagtcatcggagtaacgcccgcccacacgggccaggtccgggccggtgcgtttggagccccacaggaacgggtggtcccacacgctttcaccggcgaccgagtagtggccgtagcgttcggtttcggcgcggaacggacggatcatctgcgagtggcaacccacgcagccgttggcgatgtaaacgtcacggccttccacttcaagggccgtgcgcggcttcatgccttcgaccggcttgttggtcacgtcctggaaaaacagcgggacgatctgggtcaggccgccgatgctcacggcgatgaccatgaagaaggccagcaggccgatattcttctcgactacttcgtgcttcatcagtgagctcccacaacggcgatcttggcggcggcttcggcttcttccgggtcggcggcacgcacggtgcgccacacgttgtaggccatcaggaacatgccgctggcaaagaacgcaccgcccagggcgcggacgatgtagcccgggtggctggcttgcagcgcttcgacgaaggagtacgtcagcgtgccgtcatcgttgatcgcacgccacatcaggccctgggtgatgccgttgacccacatcgaggcgatgtagagcacggtaccgatggtggccagccagaagtgcgcgttgatcagcccgacgctgtgcatctgcacgcggccgtagagcttgggaatcatgtggtacagcgcgccgatggaaatcatcgccacccagcccagtgccccggcgtgtacgtggccgatggtccagtcggtgtagtgggacagtgagttgaccgtcttgatggccatcatcggcccttcgaaggtcgacatgccgtagaaggccagcgacaccacgaggaagcgcaagatcgggtcggtgcgcaatttatgccaggcgcccgacagggtcatcatgccgttgatcatgccgccccaactcggggccagcaggatgatcgacatcgccatgcccagcgactgtgcccagtccggcagcgcggtgtagtgcaggtggtgcgggcccgcccagatgtacagggtgatcagcgcccagaagtgcacgatggataggcgataggagtagatcgggcgttcggcctgtttcggcacgaagtaatacatcatccccaggaaaccggtggtgaggaagaaccccacggcgttgtggccgtaccaccactggatcatcgcgtccgtcgcgccggcgtaggccgaataggacttgaaccagctcaccggcagcgaagcatggttgacgatgtgcagcatcgccgtcaccaggatgaaggcaccgtagaaccagttgcccacataaatgtgcttggtcttgcgcttgacgatggtgccgaaaaacaccacggcgtaggtcacccacacaatggccagcaaaatggcgatcggccattccagctcggcgtattccttggtggtggtgtaacccagcggcagggtgatgatggcgccgaggatcacggcttgccagccccagaaggtgaaggcggcgaggccgtcggagatcagtcgcgtctggcaggttcgctgcacgacatagtaggaggtggcaaacaatgcacatccaccgaaggcgaaaatcaccaggttggtgtgcagcgggcgcaggcgaccgaaggtcgtccatggcaaaccgaaattcaattccggccaaaccagttgcgaggcgatgaacaccccgagccccatgccaaggatcccccagaccaccgtcatgatggcgaactggcggacgaccttatagttataagcagtcggactgattgctgtgctcattctaaggttccacggtttaggtttttttataggtaaaatcggccgcaagtatgtagaaaccgaggggccattgcaacgcaatgactgacctgtatcaatgcgttccacgccagattctgcgccctttccatgttttacgtggggacaaaatccaaaatggaaagctgatcaagtagacaggaattttcggggttcgggaagacttgtaactaggtgtgtgtaaacacgctgtgtgaatgacaaggagtcagtggcacgacagccggtcactgccagcctttgcgcctgtcatcgagcagaaatgttcaacccatcgagtgcaaatcggccgtcgaccggtcaataccgatccactgtgggaacaagcgtagacccgaatggcaggaggggaaagttgagggcgggaagggtgtgacaacaggtcgcgtggtgaccgcttcaagcgcccggatcagttgaggtgtgaagccggtagggttttcacaggcgagccggttattcctcccatggattgattacgttgacgccgctggatttgaaatcgctgatgttgcgcgtgacgacggtgagcccgtgcaccaatgccgtcgcggcgatcaaggcgtcactttcgtttgccttgtccggaacatgcaggtgggcacagcgcagtgcgacggcggcatcgaccggcagaatcctggcatcgaatgccggcatcacatgacgcttgagccaggtgcgcaatattttcccctgcgccggatcacgccgttctatgcgtaacaccataatttccagctctttgagcgttaccaccgagacaaacatactcggtgcgatgacgctttttgcccacgcaacgacgtttgcatcagccttgggtttacgcagttcggaaatgatgctggcagtaagtagatacatcaagagaggtccacagggcgatgagtgatcacggcgcgttcggtttcgaagtcgatatcggcggcttgcggcatgaccagcaagtcgacaatgtcggcattaaggccggtcaatttctggtagtcctcaatacttagcagtacatgggcgggtttgccgcgatcggtgatgataacgggcccttggcgggtggcttttttggcaccgcttgtgtcttggttgaattcacggctggaaatggtggtgatggtcatgggcgcaatcccctggtcaaactgaatgtagttacgttactacttcggcgacacggggggcgagggaagagggacaagcggtcatcgctcacaaaaaaagccccgccagtttttactgtgcggggcttgatggttggcggcggtttactgttcttcggtctttatatccccatgcgacaggctgtaaacgtaagcggccagcaggtgcaccttgtcgttcccctgcagcacctcctgcgccggcatctggccctggcggccatggcggatagtttgctgcagttgcgcaaggctggtgccatagatgaaaccggcgggctcagtcaggttcggcgcgcccatggcttccatgccgtgaccttgcgggccgtggcaggcgacgcaggtggtgttgaacgcagcctggccggcagcaagatcggccgtgctgtcggcgggcagtggcaatttggccaattcgtgacgcacataagcggcgacgttttttaccccgtcttcgcccagcacttcaccccaggccggcatcgccgcgtggcggccgttcatgatcgtggccttgatcgcttcggccgagccgccccagcgccagaggttgtccgccagattggggaagccatacgcgcccttggcatccgagccgtggcacaccgcgcagttggaggcgaacaggcgcccgcccatcttcaaggcttgcgggtccttggcgacttcttccaggggcatagccgagaatttggcgaagatcggcccgaatttggtatcggccttggccatttccttgtcccattccttggcggacgtccagccgtcttcatagcccggcagtatgcctttccagttgcccaggcccgggtagaggatcaggtagccgaccgcaaacaccagggtgccggcgaacagcatgaaccaccactgcggcagcgggttgtcgtattcctcgataccgtcgaaggcgtggcccatggtctggtccacgctgcccttggtctcgcccttgcgggtgccgatcaatagccaggtcaggccgatcaggctgcccagggtcaatacgcagatccatgtactccagaacagggtcatggctgtgtgctccttgttgctggctcttcttgagcgtcggttggggaaggttcgtcggcgaacggcagcaggcgtgcctgctcgaattccgcgttgcgccggttgttgaacacccacagcgacaggccgataaaggcgatggcgacgaccagcgtgccaaggccgcggacagtgcccgcatcgaattcaaatcccatggctcacctcttgctcttgatggcagtgccgagcacttgcaggtacgcgaccagcgcgtccatctcggtcttgcccttgaggctggcgacggcgccactgatgtcgtcgtcggtgtagggcacgccaagggtgcgcatcacgtgcagctttttctcggtgtggctgctgtcgacctgagccgtgaccagccacgggtaggccggcattttcgactccggcaccacgttgcgcgggttgtacaagtgcgcgcggtgccagtcgtccgagtagcgtgcgccgacgcgggccaggtccgggccggtgcgtttggagccccacaggaacgggtggtcccacacgctttcgccggccaccgagtaatggccgtagcgttcggtctcggcgcggaacgggcggatcatctgcgagtggcactgtacgcagccttcgcggatgtagatgtcgcggccttccagctgcagcgcggtgtagggcttcatgccttcgaccggcttgttggtcacgtcctggaagaacagcgggacgatctgggtcaggccgccgatgctcacggcgagcaccatgagcagcatcagcaggccgacgttcttttcaatggtttcgtgtttcatcacagactcctcaggccatctgcgccgcagcggtgacttcggcaggctgcgccgaacgcacggtgcgccaagtgttgtaagccatcagcaacatgccgctgaggaacaccgcaccgcccaccaaccgcacgatgaagccagggtggctggccaccagggtttcgacgaaggagtaggtcaaggtgccgtcttcgttgaccgcacgccacatcaggccctgggcgatgccgttgacccacatcgaggcgatgtagagcacggtgccaatagtggccagccagaagtgcgcgttgatcaggccgaggctgtacatctgctcgcggccgaagactttggggatcatgtggtacagcgcgccgatggagatcatcgccacccaacccagtgccccggcgtgtacgtggccgatggtccagtcggtgtagtgggaaagggcgttgacggtcttgatcgccatcatcgggccttcgaaggtcgacatgccgtagaaggccagcgacaccaccagaaagcgcaggatcgggtcgctgcgcaacttatgccaggcgcccgacagcgtcatcatgccgttgatcatgccgccccagctcggtgccaacagcaccaacgacatcaccatgcccagcgactgcgcccagtccggcagtgcggtgtagtgcaaatggtggggacctgcccagatgtacagggtgatcagcgcccagaaatgcacgatggacaggcgatacgaatacaccgggcgttcggcctgcttgggcacgaagtaatacatcatgccgaggaagccggcggtgaggaaaaagcctaccgcgttatgcccgtaccaccactgcaccatcgcatccgtcgcgccgccgtaggccgagtaggacttggtccagctcaccggcagggacgcgtggttgacgatatgcaggatggccacggtgatgatgaaggcgccgaagaaccagttaccgacgtagatgtgtttggtcttgcgcttcatcactgtgccgaaaaacacgacaccgtaggcgacccagacgacggcgatcaaaatggcgatcggccattccaactcggcgtattccttggacgtggtgtagcccagcggcaagctgatggcggcgagcacaatcaccagctgccagccccaaaagcagaacgcggcaatttttggtgcaaacagctgggtttggcaggtgcgttgcaccgagtaaaaggagctggcgaagagcgcgcagccaccaaaggcgaagatcaccgcgttggtgtgcagtgggcgcaggcggccgaagctggtccagggcaaatcgaagttgagcgcaggccaaaccaattgggcggcgagaaaaaccccgagccccatgccgacgatgccccacaccaccgtcataatggcgaattggcggaccaccttgtagttataggcggtacttaaagtagtgttcatggttccccatccacggttcaacccaagccggtgcggcacttgggctggagttataggcagactaaaaagcgaggcaagcatgggagaagagcacaaggccagtattgacggggatcaatgggcgcagtgtgtgcgggaacgcggctggttgtgggatgccgcgacaggcgaggcgcagggcaccttgattctggcccacggcgcgggcgcaccgatggactcaggcttcatgaccgacatggctgcacgccttgccgcacagggcgtgaacgtgttgcgcttcgagtttccctacatggcccagcgccgcgtggacggcggcaaacgccccccgaacccggcgccgaaactgctggaggcgtggcgtgaagtgcacgccgaggtgcgacgtcatgtcgctgggaaactggcgattggtggcaagtccatgggcggacgcatggccagtgtgttggccgatgagttgggcgctgacgggctggtgtgcctgggttatccgttttatgcggtgggcaagccggaaaagccgcgggtcgagcatctggcggggttgaagacgcgggcgctgattgtgcagggcgaacgagatgcgctgggcaatcgcgcggcagtggaaggctatgagttatcgccgagcatcgacttgatgtggctggtggcgggggatcatgacttgaagccgttgaaggcgtctgggttcagtcatgagcagcatttggaggctgcggcggttcaggtggccaggttcatcggcgcctgttagggcgtcatcgcaggcaagccagctcccacatttgaatgtattcacaaatcaaaaatgtgggagcgggcttgcccgcgatagcggtttaccggttgaagcgctctaccagcgagtactgggtattggcggtatgggtcaattcctcactcaactgcgccgaattcagcgcctgctccgaggtctggtccgccaacagcgcaatggtgctgatattgcggctgatctcttcagccaccgcactttgctcttcggtcgcagcggcaatctgggtggtcatgtcggtgatattggccaccgcttcgctgatgcccaccaaggcttgatccgcttccatcacccgtgccacgccttcttcggcctggcgatgcccggcgtccatggtttgcacggcggcgctggcggtctgctgcagcttggcgatcagggcgtggatctgcccggtggattcggcggtgcgctgggccagttggcgaacttcgtcagccaccaccgcaaaaccccggcccatctcgccggcgcgtgcggcttcgatggcggcattcagtgccagcaggttggtctggtcggcaatgcctttgatcacgtcgaccacgccgccgatttcatcgctgtccttggcgagctgggtaacggtcacgccggtctcgcccactgcaacggaaagacgcttgatcgcgtcgcgggtttccccggcgatatcgcggccgcgaccggtcaggcgattggcttcctgggtggcgtcggcggtgcgctgcacatggctggcgacttcctgggtagtcgccgccatctggttgacggcggtggcgacctgctcggtttccacgcgctgacgttccaggccgctggagctgttgtgcgccagggtattggactgcgccgcctggctgttcaggtgctcggcggtgtcctgcaagcgcgtcaggcaagtcttcaggcgtgcttcctggctgagaatcgacatctccagccgcgcttgggcgccgcggctgtcggtgtacatctgtgcaatcaacgggtcggaagtggtttgctcggccaggcgcagcaagcgcttgaggccacgctgttgccagctcaagcccaacaggcccagcggcaccgagagcgccgccgccagggcaaagccccagtgagagttgagcgaggcgccgatcatgaagctcaactggctgaccagaatgaagggcagccagtcctgcagcaccggcagccatttgtcgcgctggggaaccgccgacttgcccttgttgaggcgttggtagagcgcttcggctcggcggatctgctcggcggtgggcttgatgcgcaccgattcgtagccgatcacctggttgccgtcgaagaccggcgtcacataggcgttgacccaatagtgatcgccgctcttgcagcggttcttgacgatgcccatccatggcaagccttgtttgagcgtggaccacatgtgcgcgaacacggccgacggtacgtccgggtggcgcaccaggttgtgcggcgcacgaatcagttcgtcacgagtgaacccactgatttcgacgaaggcgtcgttgcagtaggtgatcacgcctttggcgtctgtggtggagatcaaccgttgctgagcggggaaggtacgttcgcgctgggtaacgggctggttattacgcatggttgttcaatccgcaaggctttcagggggtatcggccgttgcgggcgtttatttaacttatttttgcaacaatcagccggccagcatcgggtaggtaaacagcccgaagtgaagcagattcaggccaaagtgcgtaacgatggccgcgccgaggccgccaaagcgataggccaggccgtaaccgacgccggcgatgcttgccagcagcacccaatgccagcctgcgccgaggtgaaccaggccaaacagcagggaggccagcagcagcgcaaggttctcgccgtagggcaggtgcttgaagcgctggctcaggccgccctggacgtagccacggaacagcgcttcttccaccagggtgaccagcaacaggttgttcagcacccacaaccaggcctgctccggccatttgggggcccaactgatgatgcccaacaacgccgcccctcccagggctgcaacggccgtcagggccagggccagggcgctgacgcagagcgtcaggcgcagcgagcggcgcgccacaatccacgggcacgccagcagcagccagaagccaatcagcggtttgtcctggttcaggtacaacgagaatggcaccgagtcgggtgtcaaacgctggggcgcgatgccgcggccattgtagaaacccggcagccagtgcatcgccaggcccagggccagcacgatgaacaatccatggccgaggtagcgcgcccaaggggtgcgctgctgacgtacggcgtaaccggcgatcagcaagagtgcgaccgaaaccaccgccagcacgcccaattgcccgtaggtcagggccagcacatagccaatggaaagaagcaccaggtacagccagggcagagcgatcatgtgaaatccttggaaaaatctgggcggcattataacgaccgcccgtgcgtgcgggcatgaaaactcctccacgcaaaaggcttggatgaagtgattgcaaagtgtgtttgtggctggttatagtccagcggtcttaatcccttcaaaaagatcagcccatgccagcttcccctcgcatagcggtagtcgattcagcgttcagcgctgtggtcgtgccgtgtgggaacaagcagcctgcgcagatcagtcactaccccccacctgtcagtagcacgccggtgtacgcagccgtatcaccgccgggtgttggcatttcgggctgatcagcgaaccgctgttcccctctgcctgcctgaaaaaaactactgagtttcagctcatgctgaattggctttttgcctgattacaggtggtattcatgtctgttctttcgaaacaatccgtggccgcggcggcctcgacgagcctgtttgtattgctttggagcagcggcgcgatcttctccaagctgggcctggcccacgcgtcgccctttgcctttctgttggtccgttttgccatcgccctggtggggttggtgattctggtgccgatcctcaagctgaaactgccaagccccggcaagcctctgtggtatgcggcggcgaccgggttggtgttgttgggggcctatcagattttctatctgctggccctggacctcaaagtcacccccggcgtgatggctaccctcatgggcgtgcagccaatcctgaccgtggtgctggtggagcgtcggcgttcgtggagccgcctgtttggcctggcgctggggttggcgggcttgatcatggtggtctaccagggcatcggcctgtcggggatgtccctggcggggatgctgttcggtttgctggcgctggcgagcatgacctttggctcgatcatgcaaaagcgcatcaccgacaaccccttgggcacactgccggtgcaatacctggcggggttgctgttgtgttcggtgtttgtgccgttccagccgttccatgttgaacacagcgcaggcttttacgtgccggtgctgtggatggggttggtggtgtcattgctggcgacgctgttgctgtaccgcctgatcgcacggggcaatctggtgaatgtcaccagcctgttctacctggtgccggcggtgacggcggtgatggactacctgatcttcggcaaccgactggcgttgctgagcctcctgggtatgggcttgatcattgtcggcctggtctttgtattccgtaaaaactgacggttgaacccgctgtaggggcgcaaggctcctacagcgctttggccaacttccctggccgcaacaccaaccacaacgcccccgcaatcagaatcccgccatacaggtgtgccatcgacaacggctcatcgagcagcaatgccccccacaacaccccaaacggcggaatcatgaaggtcacggtcatcgatttgaccggcccgatggatgacagcaggcggaagtaaagaatgtaggcaaatgccgtgcacagaagccccaacccgagcaatgacaaccatacctgccagccgccccgactggccggcggatggctgatggcgttgtaagcgaagagggggagcaaaaacagtgtggcaccgagcatgctgcccagggcggcgaggcggctgtccagcccgccacgttgatcgagccagcgccgtgccaagaaaccggcaaagccataacaagtggttgccagcaggcaggccagcgcacccatcagcaagtccaggtcaaacgccaccggcccggcacgggtcaacacgcccacgccaaacaggcccaggcacaccccggcgattttcgacggtgtgaggcgttcgctgaaaaacagcccgccaatcaacacacccatcagcggcgtcgtagcgttgaagatggccgagtagccggcgggcagcacctgggcggccaccgagtacatggtggcgggaatcccggagttgatcacgcccagcagcaggacggtcttgaacttgccctggaaatcccagttcacgcgcatcattgtgagaatcaccagcaagccggcggcggcaatcgatacgcgaaagaacgcggtgggcaccgtaccgatttccggcgcgataatgcgcatgaacaggaagctcgcgccccaaatggcagcgagccccagcaggtacaaggtgtcgacaggtctcacggcacgtgcctctattgataaggcggcgattcttgcccagtggcctgcccggcacaatgactaattacaaaacaaaccgcgtcaccatcccgttgaggtccacggccaggcgcgagagttcctggctcgcggccgaggtctgggtggcgccggcagccgtctgtgtggacaagtcgcgaatgttcaccaggctgcggtccacttcacgggccaccagtgcctgttgctcggcagcgctggcgatcaccaggttgcgctggctgatctgcgagatggcggcggtgattttttccagcgcattgccggcgctgttggcgcgttgcagggtctgcccggcatgttcggcgctgctgttgagtgcgccgaccgtgtcctgcgtgccttgctggataccgttgatcatctgctcgatttcttcggtggagttctgggtgcgttgcgccagggaacgcacttcgtcggccaccaccgcaaacccacgcccggcttcgcctgcgcgggcggcttcgatggcggcgttcagcgccagcaaattggtttgcccggcgatgccacgaatcacttccagcaccttgctgatgtcctgggcctgaaccgccaggccttcggctttgttggacgcaccgagcacctcgtccaccaggttctggatcgaactgatggtttcgctgatctggtagtggccgtgtttgctgtcttcatcggaggccttggacgcctcggcgctggacaccgcattgcctgccacttcatccaccgccgcgctcatttcgttgacggcggtcgcagcttgttcgatttcatcgttctgcgcctgcaggccgcgggtgctctgttccatcaccgagctcatctcttcggcggccgacgccaactgctgcgccgactcgctgatgccatggatggtggatcgcaactgttgctgcatggtggccagcgcggtcagcaattgcgccggttcgtcatggcccgtcaccgcaatcggttggctcaggtcgccggcagcgatggtgcgcgccacggtcagggcctgggcgatgggggcggtgatgctgcgggtcagcagccaggccagcaacaaggtggcgatcagcgcgcacaggattatcaggccgaccacccactgggcgttggtgtacatctgcgcggcagcctctgctgcgtcctgcacgcctttctggttgaaggtgatcatgtcctccaggcttttgttgagcacggtgccctgagggccgagacgggtggacagcaagtcgatggcgtcttgttgctggtccttgtcgaccagggcaaccatctggctgacgatggtgacgtaagtgttcacatcggcgttgagctgcttgagcatcgaacgttcttcgtcgccgctcagcagttcttcatgatgcgccagcaaggtttgcagttcgctgcgttggcgggtgatcaggcttttgctgttgtcgcggatgcgggattcgtcggtggttgccatgcgcatcgactccaggcggatggcggcgatgcaggcggccgcatcgtggatattctcaatgctcggcatccatgactcttcaatcaccagcgcactttcacgcagcttggccatctgccccaggccaaacattccaacaatcaccagcatactggccagcaccccgaaactcaggctggcgcgcagaccgatccgtatattcctcaatgacatctcaatgctccttaggcggttttaacctgttcccggatcggtcttctgaccttgttagggtgggagagggcgcgctatatagcaaagtgccattgctgtggtaatcagggtttcccttacgctgtatcaaaacggttacagaagttgtgaaacgcactgttgcccggtttttttcagtttcgacgccaagccacgggggggaaggcctgcagctgttaattgtgcgactttttggtgcgttttttgaccgcagagtcgaattgtgaaatgtgaaagaaaatgtacgaaacacataaatatgtacaactcgccccgacaattcttccttctcctgcctgcgttcactggctaagctcagggcttccagatgcccgttcgaggtttcccgcatgccgcaatccgccctcgccatcgcccggatgatcctcgatggtttcgacgattatcgtgagcatttccgccggatcaccgatggcgcccgcgaacgcttcgagaaggcgcaatggcagcttgggcaggcggcttcggcagcgcgtatcaacctatatgaagagaaagtcgctgaagtgacggcacgcctgcgtgacggatttgaagaggcgacgctgctggacgtcgatgcatggcccgtggtcaaaagtgcttatatcggcctgatcgacctgcgtttcgacgatgagctgtcggagacctggtacaactcgattttctgcggcctgttcagccacgacctgatcagcgacggctgcatgttcatccacaccacccggcccagcctgcgccgcgcgcgggcggcgcaaacccgcctctatgcaccggccggcaagcttgccgaaatgctcgcgcagatcttcgccgactaccgcttcagcgagccctacgccgatttacctgccgacctgcgtcgcctggaagcacaactgcgggaaaacctgccggactgggtgtgcaaagaccctgacctgactgtcgagctgttttcctcggtgctttaccgcaataaaggcgcgtacctggtcgggcgcctgtacacccgcgacgaacaatggccgctggtgataccactgctgcaccgcgaagggcgcggcattcagatcgatgcgctgatcaccgatgaagccgaggtgtcgatcatcttttcgttcacccgttcctacttcatggtcgacgtaccggtgcccgccgaattcatcggttttctcaagcgcatcctgccgggcaaacacatcgccgagctgtacacctccattggcttttacaagcatggcaagtcggagttctaccgcgcactgatagaccacctggccaccaccgacgaccagttcatcatggcccccggcgtgcgcggcatggtcatgagcgtgttcacgctgccgggtttcaacacggtgttcaagatcatcaaggaccgtttttcaccgtcgaaaaacgtcaaccgcgccaccgtgatcgagaagtaccggctggttaaaagcgtcgaccgggtagggcgcatggccgacacccaggagttcgccgacttccgttttcccctgagcaaatttgagcccgaatgcctggccgagctgctggaagtcgccgctggaacggtcgaagtcgaaggcgacacggtgttgatccgccactgctggaccgagcgccgtatgaccccgctcaacctctacctcgacaacgccaacgcggcccaggtgcgcgaagccctggaggactacggcctggccatcaagcaactggcggcggcgaatatcttccccggcgacatgctgctgaaaaacttcggcgtcacccgccacggccgcgtggtgttctatgactacgacgaaatctgctttctcaccgaagcaaacttccgccatatccccgcgccgcgcacgcccgaggatgaaatggcgtccgagccctggtattcgatcggcccccatgatgtgttccccgaggaattcccgccgttcctgtttgccgacgccagccaacgcaagctgtttgatgagttgcacggcgagctctataacgccgactactggaaaggcctgcaggaggcgattcgcgcaggcaaggtgattgatgtgttcccgtaccggcgcaaggatcctctgtaacacttaccccttgtgggagagggcttgtgtgggagcgggcttgcccgcgatagcggtgtatcaggcggtagatgtgttgctgacagatcgtaatcgcgggcaagcccgctcccacacaaaccccacattgacatagccgtctgcccgataagacgcttttctgccacacttggcggccgtgcctatatagatgaccgtcaagtacctgatgactgaccaagcgcccactatcgaccaactgctcaaaaccctcgatcacgccatgctcgccgaccgccaccgcttgcggcggcaattgcttgagctgcgcaagcaacccgacgaggagaagctggcgcagtgggtcgtgcgcatgcaggcgtcctgcgcccaggtcacggcgcggcgcgccagcctgccggtgattcgctacgacgacagcctgccgattgccgccaagcgcgacgagatcaaagctgcgctgaacaaacatcaggtgctgatcatcgccggtgaaaccggctcgggtaaaaccacgcagttgccgaaaatctgcctggaaatcggccgtggccaattcggcctgatcggccacacccagccgcgccggattgctgcgcgcagcgtggcgagccgtgtggctgaagaactggctacgccgttgggcgcgctggtcggctatcaggtgcgtttcgaagaccagagcgattccaacaccctgatcaaactgatgaccgacggcatcttgctggcggaaacccagaacgaccgctacctggaacgttacgacacgatcatcgtcgacgaagcccacgagcgcagcctgaacatcgacttcctgctgggctacctgaaaaccctgctgccgcgccgcccggacctgaaagtcatcatcacctcggcgaccatcgacctggagcgcttctccaaacattttgacgatgcaccgattgtcgaagtgtcgggccgcaccttcccggtcgatacctggtaccgcccgttgacgctggagcaggacgaagagggcaaccgcgtcgaggacgacctgacggtcgaccaggcgattcttgccaccctcgatgaaatcgctgcctatgagcgcagcgaaaagcgcagccccggcgatgtattggtgtttctgcccggcgagcgcgagattcgcgacgccgccgacatgctgcgcaaggctcagctcaagcacaccgagattctgccgttgtatgcgcgcctttcaccggccgagcaacagcgcatcttccagtcccacccgggccggcgcgtggtgctggcgaccaacgtcgccgaaacctcgctgaccgtgccgggcattcgctatgtgatcgacagcggtaccgcgcgtatcagccgctacagctaccgcgccaaggtgcagcgcctgccgatcgaggcgatttcccaggccagcgccaaccagcgcaagggccgctgcggccgagtagagccgggcatttgcattcgcttgtacagcgaagaagattttatcgggcggccagaatttaccgatccggaaatcctgcgcaccaaccttgccgccgtgatcctgcagatgctgcacctgcgcctgggcgagatcaccgactttccgtttatcgaaccgccggacggcaaggccatcagcgacggtttcaacctgctgcaagaactctcggcggtggaccgcaacagccagctcacgccgttgggtcgccagttggcacgtttgccggtcgacccgcgcatggggcgcatgttgttggaagcggccaaactcggcagtttgcaggaagtgctaatcgtggccagtgccatgtcgatccaggacccgcgcgaacgcccgccggagcgccagcaagccgccgaccaggcccacgcgcagtggaaagacgcggattcggacttcgccggtctggtgaatttgtggcgcggttttgaagaacagcgccaggcactcactgccagcccgttgcgcaactggtgccgcaaaaacttcctgaattacctgaggttgcgcgagtggcgcgattcccatcgccagctcagcctgatctgccgcgacatgcagctgaccctcaacaaagaaccggcggactttcccaagctgcacaaggcggtattgtccggcctgctcagccagatcggccagaaaaccgaagacggcgattacctgggcgcgcgtcagcggcgtttctggattcacccctcgtcgggcatcggcaagaagcgcccgcagtggctgatgaccgcagaattggtggaaaccaccaagctgtatgcgcgcatggtcgccaagatcgatgccgactggatcgagccgctggccgggcacttgatcaagaaaaaccactttgaaccgcattgggagaagaaacgcggccaggtcgtggcatttgaacagatcaccctgttcgggctgattgtggtcggccgccgcccggtgcattacgggccgattgacccggtggtgtcgcgcgagctgtttatccgtgagggcctggtgcgtggcgagattcagtcgcgggccaagtgcctcacggccaaccagcaattgctggagcagttggacgagctggaagccaaggcgcgtcgtcgtgacatcctcgccgatgaagaaaccctgtacgcgttctacgatgcgagtttgccggctgagatccaccagaccgccaccttcgacagctggtacaaggtcaacagccagaaaaacccgcaattgctgatcatgcgcgaagaagacgtgctggcccgcgaggccagtgaagtcaccgcgctgcattacccggacaccttgcacctgggcgacctggagctggcgttgagttaccacttcgagcccaaccacccgcgcgacggcgtgaccctgcgcgtgccggcgccgctgctgccggccttgccaccggagcgcctggaatggctggtgccgggtgtcatcgaagccaagtgcattgcgctggtgcgcaacttgcccaaggctctgcgcaagaacttcgtgccggtgccggacttcgtcaaggcggctttgcaacgcatcgaattcggccagggctcgctgccccaggcgctggggcgcgaactgctgcgcatgaccggtgcgcgggtcagtgatgaggcgtgggcagaggccgcgcagcaggtggaaaaccatctgaagatgaacttggaagtggtcgacggccagggcaagttcctcggcgaaggccgcgacctcgccgagttgactgcacgctttgccgaggccagccaggctgccttggccgtgccgcaaaccgcgaaaagccagcagccggtggaggccaaggtgtttgcggcggtggccgagaagacccagcagaagatcgccgggctttcgatgacggtgtacccggctctggtcgaggaaaacggtacggtcaaggaagggcgtttttccaccgcagccgaagccgaattccagcaccgtcgtgcgttgcagcgtttgttgatgcagcaactggcagaaccggccaaattcctgcgcggcaagttgcccggcctgaccgagttgggcctgatgtaccgcgaactggggcgtatcgatgcgctggtggaagacattctgctggccagcctcgatacttgcgtgctggaaggcgaagccagcctgccgcgcgatggcgctggcctggctgcgttggccgagcgtaaacgtggcagttggaccgagcatgccgaacgcctggcgcgccagacgttggaagtattgaaactctggcatggcctgcaaaagcgcttcaaaggcaagatcgacctggcccaggcggtggccttgaatgacatcaagcagcaactgagcaacctggtgtatcccggctttgtgcgggaaaccccctcgcagtggttcaaggaattgccgcgttttctcaaggccattgaactgcgcctggaaaagttgccgagccaggtccagaaagatcgcgtgtggagcggtgagctggcgggcttgtgggttcagtacgaaaaccgcctgaaaaaacatgcccaggaaggcaagcgcgatccccagttggagctttaccgctggtggctggaggaataccgggtgtcgctgtttgcccaacagttggggaccaaggtgccgatttccgacaagcgtttgagcaagcagtggagtttggtcgaggcttgaggtctttctcgtttttgaatgctgctcaggtcaaatgtgggagctggcttgcctgcgatagcatcactgcggtcctgctgacataccgaggtgtctgtatcgcaggcaagccagctcccacacaagccacttcctacaggtgtagccggggtttttccagcggatggcgccaaacttgcggggttgtggcaaacttcgcggttataaatgccgggatcgtcgtgaagggctacggcgcgatggaataaagcgttgccagtttgatgtccgcagtacggaatcggactacttacagtttggtacgacggtaccaatatcttctgcctgacagatttagaggaacgaccgtgcataacgtcgtcatcagcggcactggcctgtacaccccggccaacagcatctccaacgaagagctggtgcagtctttcaatgcctacgtgcaacagttcaacgcagacaatgccgccgccatcgagcgcggggacgtgcaggcgctgaccgaatccagcgccgcctttatcgagaaggcgtcgggcatcaagagccgttttgtgatggacaaggacggcatccttgacccgcaacgcatggccccgcgcctgcccgagcgcagcaatgacgaatggtcggtgctctgccagatggcggtcggcgccgctgaacaagccttgcaacgcgccggcaagaccgccgccgacatcgacggtgtgatcgttgcctgttccaacctgcaacgcgcctacccggccatcgccattgaagtccaggaagccctgggcatcgaaggttttggttttgacatgaacgtggcgtgctcctcggccacctttggcattcaaaacgccgccaacagcatccagctcggccaggcccgggcgatcctgatggtcaacccggaagtctgcaccggccacctgaatttccgtgaccgcgacagccatttcatcttcggcgacgcggccaccgcagtcgtgctggagcgtgctgacctggcgacctccgcgcatcagttcgacgtggtaagcaccaagctgctgaccaagttctccaacaacatccgcaacaacttcggctttctcaaccgtacggcggaagaaggcatcggcgcgccggacaaactgttcgtgcaggaaggccgcaaggtattccgcgacgtgtgcccgatggtcgccgagctgatcggtgtgcacctggaagaaaaccagctgaacgtggccgatgtgaagcgtttctggctgcaccaggccaacctgagcatgaaccacctgatcgtgaagaaactgctgggccgcgaagcctcggtggaagaagcgccggtgattctcgacacctacgccaataccagctcggcgggctcggtgattgcgtttcacaaataccaggacgatttgccaaaaggctccgtcgcggtgctcagctcgttcggcgcgggttattcgatcggcagcgtaatcctgcgtaaacgctgatatagagccggaatgcggttaatgtgggagctggcttgcctgcgatgacgagggtgaattcaccgcggctatcgcaggcgagccagctcccacaggtatccacagcagtattgaggtaaacgatggcagcagcggacgacgcgcacctgcttgaacgattgctcaagggcgagcagcgggcctacaaggaattggtcaccacctaccagagcgccatgcgcgcggtggcctatgcaattgtcggccagcgccacgccgacgaagtggtgcaggatgcgtggctgtcggtggtacgcaacctggccaagttcgaggggcgttccagcctcaagacctggctgctgaccatcaccgccaactccgccaaaggccgctacaaacagaaccgccgggaagtcttgcttgacgatttgccttcgccccacggcaccatcggcgacgatcgtttcgtgccggatgatggccactgggctgtcgcgccgtacgcctggcatcaggacaccccggaagcgctgctcaccgaagatgaactgcgcaaatgcctggagcatacgctgctgagtttgtcggagctgcaaagcagcgtgttggtactgcgtgaacgtcagggcctggagttggaagagatttgtaatcttctgaccctgtcgctctccaatgtccgtgtgctgttgcatcgagcacggcttaaagtcttcgccacggtggagcattttgaggaaacgggcgaatgttgacctgtaaagaacaagtggcacgttccagcgactatctcgatgggcaattgacctttcgcgagcgtctgatggtgcgtcatcacttgatgttctgccctaactgccggcgattcattcgtcagatgcgcctgatgcaggcgactttgaagataatgccggaggagccggtaaaggacgctgatgcactggctgatcgactcgtagccgaacggctgaaagatcagtaaaggcgggaaagaggcagactcgcgtgggtgagtcgaacggatgatggggatcgacccacccacgcaaggctgttgtagccacctcgggccgtcctggcccaaggcttttcacactcacatttagaacttggcttcagcatccagctgcagggtgttggtgttggcatcacgctgcgtgcggctggcgtagtcagccttggtcaggaaatacgtggcgcccagagcgaagttcttgtcgatgtcgtagctgaccttcatcttgtgaccgcgcgaaccggtggtgccgttggcgaagtccgagtcggtgaaggcgccgaccactgcgttacgttgaatatcgcggtagttgtagtccaggttgaaaccaaacactttggacttggcacccaccaaccaggcggtgtcctgatcggtcacggcgtcgttgtttttcacgtactggccgtagaaggctagaggcactgccaggccaccgatgtcagcctgggcaaaaccttcatacaggcggaactggttgtcggccgagttgccgttgaccgccagcgcgcaaggcgtggtggtggttgtgcaacggctgtccttgtcgttctggtaggcgtagacgctgccgcccagggtcattttcaggttgtcggtgaccgagaaacgcgtacccaactggccggacgtcaggcgcaggtcgtgacggaactgcacgccgtcgccatccacgttgtccttgaggttgtagttaccgatgctgccgaacagctcggcgctgctgcccaacgggtatttgtaggtcagggccagaccttccgggttgatgtcgctatcccagatcacgtcacccatgttgacccacggttgcagcatcttgccgccgatcacgtgcaggttcttgatctggtccgggtggtagtcgatgtagccgaggtccagccagatcgacttcttgtcgaagtagttgtcctggtcctggttggtcgaacgggcgtcgtcgctgctgccggtggcgatacggatgccagtgtcgacctgggagttgatctcggtgtaggcgcccagacgggcacggatgcgctgacgatccttgtcgcggccaccgttattggattcgccctggatcttcacggtttcctgacggaaacgtacgtcacccttgaactgggtcttcgcggcccaggccagcttctggtcgaagctgctcagttcggtggtttttttcgcggtggccgcgatctgctcgttggtctcttgttgagcttgccgtgcgatctgctgttctttctggtctttggccagttcgctttgcaattcagtgtactgcgcagcggtgatctggccgttggccttgagcatgtcgagcaatttagcgtcgactgcagcgctggccggaacgctcagggccagcaacaggccgccacacaggaccgccgcagttttagtggaagcaagacgcatatcaatctccgaaagtgaggagggatggcaaaccatccaggacacaaccgaccgatgacggacggaaaaatagccgcctgctagaaccaggcgctctaaaaacaggcgtcagtatcactatcgtttatgacggagcagtggctaagtgatgtcatgtagatgacaaattatttataaaggaactatgtggcacgggttttgtcgtgccatttgaaggtgtgcgaaccccggcgataagcgatactcgccaggctttcacgccctgaagtagtgaggatgccgatgccgttgcaacgcctggacagcctgtccgaaatcgccccgcaggtttgggatgccctggtaccgcaggcccagccttttgtgcagcatgcgttcttgagtgccctggaagacagcgccagcgtgggcccgcattcgggttggcagccagagcatttgctgcactgggagggcgaacgcctggtagccgcattgcccggctatcgcaaatggcactcctacggtgagtacgtgttcgatcacggttgggcggatgcctgcgagcgtgcgggcatcgattactacccgaagttgctgacggcggtaccgttcagcccggtcagcggcccgcgtgtgctggcggccaatgcgcaggacgggttcgagctgctcaacgcattgccgggttacctggaaatcgaaggcctttccagtgcccacatcaatttcacggacgctttggccgacgaagcgctggcgttgcaacccggctggttgcagcgcttgggctgccagtttcattggcagaaccgtggctatcgcgactttcaggacttcctcgacgccctgagttcgcgcaagcgcaagcagatgcgcaaagagcgcgagcaagtggcggggcagggcatcgattttgaatggctgcaaggccatgagctgagcgagacacaatgggatttcgtctacgcctgctacgccaacacctacgcggtgcgccgccagtcgccctacttgacccgcgcatttttcagtctgttggccgagcgcatgccccaagccatccgtgtagtgctggccaaacaaggttcacgcccggtggccatggccttcagcctgatcggcggcgacagtttctacggccgctactggggctgcctggcggaattcgaccgtctgcatttcgaaacctgcttctaccagggcatggactacgccatcgcccacggcctgcaacgtttcgatgctggcgcccaaggtgaacacaagctgatccgcgggtttgagccggtgatcacacggtcgtggcattacctgcgccacccgggcttgaaaaatgccgtggaggattttctggagcgcgagcgcgtggggattgtggcgtatgccgaagaggcgagggcagccctgccttatcggcagggctgaacccgtttagctcaggccggttcctccttgcccagccatcgataggtcacgccgccgaccaccgcgcctagcagtggcgcgagccagaacatccataactgctggatcgcccacccgcccacgatcagggccgggccggtactgcgggccgggttgaccgaagtgttggtcaccggaatggagatcagatggatcagggtcaaggccaggccgatggcgatgggcgcaaggcccaccggggcacggcgttcggtggcgccgaggatgatcagcacgaacatcgccgtcatcacccactcacagacaaaccccgctgccatcgaatagccgcctggcgagtgttcgccgtagccattggaagccaagccgctcgccagttcgaaacctggcttgccgctggcaatgaagtacagcagcgcagcggcgatggtgccgccgacgacctgcgccacgatgtacgctggcaattccctggccggaaaccgccctcccaccacaagccctaccgataccgccgggtttaggtggcagccgctgatatggccgatggcaaatgccatggtcaataccgtgagcccgaacgccagggatacgcccaacagaccaatcccgactgcaggaaaggctgcggccaacaccgcactcccgcaaccgcccaacaccagccaaaacgtacccaacccctctgtgactgaacgcttgaacaaagacatgaagcccgtccttgatagatcgctctaccgactcagtaaatcagtgatgctccctgcagatttactacagcacccgtctgggcactgcactgattacagcacgcttttgatacaaatccaggcgcaaaaaaaacgccaggccccgtaaaaccggagtctggcgctgatcaagtgtgggagctggcaagccagttcccacaggtttagcggtgcgtgttcagtcgatcccgacaaaacccccggtctggtgctgccacaagcgtgcatacaacccgccatgggccagcaactcggcatggctgccggtttcggcaatctggcccttttccagcaccaccaggcggtccatgcgcgcaatggtcgacaaccggtgcgcaatcgcaatcactgttttgccttgcatcagggtttccaggctttcctggatcgccgcttccacttccgagtccagcgctgatgtggcttcgtccatgatcaggatcggcgcgtccttgagcagcacccgcgcaatggcgatgcgctggcgctggccgccggagagtttcactccacgctcgcccacatgggcgtccaggccggtgcggccttcggcgtccgacagtaacgggatgaactcatcagcgcgagctttgcggatggcggcggtgagttcctcatcggtggcattcggcttgccgtacagcaaattgtcgcggatcgagcggtgcagcagcgaagtgtcctgggtgatcatgccgatctgttcgcgcagggtttcctgggcgacctcggcgatgttctggccgtcgatcaggatccgcccgccttgcaggtcgtagaggcgcagcaacaggttgaccagggtcgacttgcccgcgccggatgggccgatcaggccgattttctcgccggccttgatctcaaggttcaggccgccaatgatcccgctcttcttgccgtagtgaaagtccacctgttcaaagcgtacttcgccatggggaacggtcaggcgctgggcgttttcgcggtcggtgaccgccagcggcagggcgatggttttcaagccgtcctggaccatgccgatgttttcgaaaatgccgttgaccacccacatgatccagcccgacatgttgacgatacggatgaccaggcccgtggccagggcaatcgcgccgaccgacaccagcgactgcgtccacagccacaaggccaggcccgtggtggtgacaatcagcaggccgttgaggatggcaatgaccacgtccatgctggtgagcacgcgagcggccaattgggttttttcggtctgctcaatgatcgcttccctggcgtattcctgttcactctgcgtatgggcgaacaacttcaaggtggtgatgttggtgtagccgtcgacgatgcggcccatcaacttggagcgcgcttcggacgagacgaccgagcgttccttcacccgtggcacgaagtaacgcaatgccaggctgtaggcaatgatccaggtaatcagcgggatcatcaggcgccaatcggcttcggcaaacagcaccagggcgctgatggcgtagatcgacacgtgccagatggcttctgcggtggccaccgccgagtcgcgcagggagttgccggtctgcatgatgcgctgggcgatgcgcccggcgaaatcgttctggaaaaagttgaggctctgtttcaacacgtagctgtgattctgccagcggatcaggctggtcatgccggggttgatggtctggtgcacgagcaagtcatgcaggccgttgaagatcggacgcagcagcagggcgaccacggccatccagatcagctcggcgctgtggatctggaagaagttggcgggcggcgtgccctgggccaggtcaatgatgcggctcaagtagctgaacagcgccacttcaatcagcgcacccaccaggccgaccaccagcaaggcggcaaaacttgaccacacctggcgcaggaagtagaggtagaagggcaggactttgtcgggtggcgcggcgctgggcgcgtcgcggaaaatatcgatcagttgttcaaaacgacgatagagcattagggttgacgcccgcctggcgggctctcctttcaaaggcgcgcgcagccttttgggctgcgcgcgaagcttcctgcagacctcagtcgatgcgcttggccgacttgatcagaacaggatcgattggcacgttctgcatgccctgcttggtggtggtctgggagttgacgatgatatcgaccacgtccatgcctttgacgaccttggcgaacaccgcataaccggcatcgcggcccgggtcgaggaaggcattgtcggccacgttgatgaagaactggctggtggccgagttcgggtcgttggtgcgcgccatggacagggtgccgcgtacgttatgcaggccgttgctggcttcgttcttgatcggcgcctcggtcggcttttgcgacatttgcgcggtgaacccgccgccctggaccatgaaacccgggatcacacggtggaaaatcgtgttggtgtagaagcccttgtcgacgtaggccagaaagttcttggtactgatcggcgccttgaccgggtccagttcgatttcaatgtcgccattggtggtgctgatcagtacgtgctgggccttggcgggttcggcggccatcaggttggcggcgaacaatacggaaccggcgaagaaggcgatttttttcagcatgggtcagtgatcctgggtagtggtttcgactgtctttagaaaatcgagcaaggtagcgttaaagacttcgggttgatccaagggcgtggcatggcgggaatctttgatgaccaccagccgcgcatcgggcagcagttttacatagttttctttctgcgccacgggggtgtagtcgtggtcggcgctgatgaccagcgtaggacaggtaattcgggaaagttgttcctgcacgccccagcctacaatcgcgtcgaagctggcgagataagcacgtttgtcgttttttgcccagcgctcggccatcttgcggcgcaagtcggcctggtgcggtttggggaataaccggtcaccgagggctttgccaatggttgtcaggctgagcagccgtgccaggctccagcgcttggcccactgccaataatcatcggcactgcgcaccttgacctcgggcgcgctgttgacgatacacaggctcttgacccgcgcgggttcgtccacggccagctggaaggcgatcatgccgcccatggacaagcccaccacgtgggcaggtggcaggttcaggtgttcgatcagtgcaatcagatcgaaagtaaagccccgaatgctgtagcgctcgcggggtttgtcggagcgcccgtggccacgcacgtccaccacgatcaggcggtaatgccgggccagcaccgggatctgcagttcccaatcctggctgctcgaacccaggccgtggatcaggatcagcggcgcgccgtggccgtattcctcgtaatgcaggctgcagccttcatggtcgaaccaggccatgggtgaactccgtttcaggcttgctggggggcggcgaaaggcgcgtccaggggggcggtgtcaaaggtgcgcagcaggtcgatcagaatctgcgtggcgggccccaggggtttgtctttgttcgaatacagatagaacgtcgggttgcggctgccgcccttttccagggggagctgcttgagcaggccttcgttgagctcgcgctcgatcatgtgcttgggcagccaagcgaaacccagcccgctgctgacgaaggtggccgcggtgggcaggctgccgacggtccagcgctgttcggcgccgagccagcccacatcccgcggctgttggcggccggagtcgcggatcaccacctgcatctggctttcgaggtcctggaagctcaattcacggttcaggcgatgcagcgagtggtcggggtgggccacggcgatgaattccacatcgctcatttcggtgcccagatagcccgggatgatgaaaccgctgatcgccaggtcagccatgccatccatcaacaattcttcgacgccggagagtacttcttcacgcagccgtacacggcaaccccggctttgcggcatgaacgcggtaagggcacgcaccaggcgggcgttggggtaggccgcgtccaccaccagccgcacttcggcctcccagccctgttccatatgatgggcgaggtcttccagctggctggcgtttttgaccagttgccgggagcggcgcagcagcacttcaccggcgtcagtgagcaccgccttgcgcccgtcgatgcgcagcaacggcacgccgagctggtcttgcatgcgtgccacggtgtagctcaccgaggactgcgaacggtgcagcgcttcagccgcctgggcgaagccgccatggtcgaccacggcctgcaaggtgcgccattgatcgagggtaacgcggggcgctttcaagatgagctcctcttgtcctaagctggcggtccttattggagactgccgaatgagaaaattctgttgtgtgctgctggcgctgctgccattgacggcgtttgcctataccaccgatgtttccaaagatattcagggggtgaagattgattacagtgcgtccgacatcgacagcaatatcagctctatccggttgaccaactacggcaccaatgacgccgtgtgcaaactggtcttcaccaatggcccggaagccccccgtgcccgcaaggttacggtcgaggcggggcaaagcactaacaccaccgtcaatttcagccgcagcattatcaaaatgcgcatcaagctgacctgcaccccgaaataaaaccgcagcggagcatgcctacagcaatactccgcttataaacaaatttatagatgggttatagcagttatttgcgctttttaatcgaatgagccctgtttaatcttttctccatcgcctcacagcacttacagatggagcctacaccgccatgtccagcgttctgatcatcgaaagcagcgcccgccagcaggattcgatttcccgccagttgacccaacagttcatcagccaatggcacgttgcacacccggcggatcagatcaccgtgcgtgatgtggcactgaacccggttccccacctggacgccaatttgctcggcggctggatgaagccggctgaacaacgcaacactgtcgaacaggcttccctggaccgttccaacgaattgaccgacgaactgctcgccgccgacgtgctggtcctggccgcgccgatgtacaacttcgccatccccagcaccctcaaagcctggctggaccacgtgctgcgtgccggtgtgaccttcaagtacaccgccaccggcccgcaggggttgctcaccggcaagcgcgccattgtgctgacggctcgcggcggtattcacaccggcgccgcttccgatcaccaggaaccgtacctgcgccaggtcatggcgtttatcgggattcatgacgtgaccttcatccacgccgaaggggtgaacctgagcggcgatttccaggagaagggcatcaaccacgctaaagcgctgttggcccaggtcgcctgatcctttaatcgccagataatcgcgaggtgtttctctaggcccacgcaaacccttcaagtacgcgtatcgaacctccctttgcactttttgctcctgagtgctcctgcccgactgccgctatagcgaggtcgggttttttttgcctcgagtttcagtaaacgtcgaaaacctttaatgtcccgcccattcgaaatgaggcgcgcatgggctatctactggttgtcaccctgattcaggcattttccttcagtttgatcggcgaatacctcgccggtcatgtcgacagctacttcgcggtgctggtgcgtgtggtgctggcgggcctggtgttcatcccgctgacacgctggcgttcggtggagcctgcgttcatgcgcggcatgctgatgatcggcgcgttgcagttcggcgtgacctacgtgtgcttgtatttgagttttcgcgtgctgacggtgccggaggtgctgctgttcaccatcctgacgccgctgcacgtcactttgatcgaagacgctctcaaccggcgcttcaacccgtgggcgctggtcgccgcattggtggcggtgggcggcgcggcggtgatccgtttcgaccagatcaccccgaatttcctgatgggcttcttgctgctgcaactggccaacttcacctacgccgccgggcaggtgatgtacaagcatctggtggcgcgccatccgagtgatctgccgcattaccggcgcttcggttacttctacctgggtgccttgatcgtggtgctcccggcgttcctgatgttcggcaagtcaaactacctgcctgaagcgccgctgcaatggggcgtgctggtgtttctcgggctggtcagcaccgcgctgggcatgtactggtggaacaagggcgcgtgcctggtcaacggcggcaccttggcggtgatgaacaacctgcatgtaccggtggggttgctgctgaatttgctgatctggaaccagcacgaaccgctggggcgcctggcgttgggcgggttggtgattctgggggcggtgtggatcagccggctgggtgtgcgcaaacagccaatctcgcgctgaaccctgtgggagcgggcttgcccgcgatagcggagtgtcagtttgcagatacctcaactgatacaccgccatcgcgggcaagcccgctcccacaggagatgggtggcgtcaggccgaattgttttccagagctggtaaatgacttgcccccaacaccgcaggcaacacccccgcgcgcaaatcattaccactcggctgctgatacaggctcaacccaaactccggcagcaccgccagcaagtaatcaaaaatatccccctggattcgctcgtaatccgcccacgccgtggtgcgagtgaagcagtagatttccagcggcacgccctgggcggtggtttgcatctggcggaccatgcaggtcatgttcggctggatgtccgggtggcttttcaaatacgccagggcatacgcgcgaaaggtgcccaggttggtcatgcgccggcggttggctgaaagctgcgcgctgtggccctgggcttcgttccaggccttgagttcggcctgtttgcggctgatgtagtcggtgagcaggtgcacctgggtcatgcgcacttcttcatcgtcacgcaaaaagcgcacgccgctggcgtcgataaacaggctgcgtttgatccggcgaccgccggaggcctgcatgccgcgccagttcttgaacgactcggacatcaggcgccaggtcggaatggagacgatggtcttgtcgaagttctgcaccttgaccgtgtgcagggtgatgtccacgacgtcaccgtcggcgccaacctggggcatttcgatccagtcgcccacgcgcagcatgtcgttgctggtcaattgcacgctggcgacgaatgacagcagcgtgtccttgtacaccaacaggatgaccgccgacatggcacccagccccgagagcagtagcagcggcgagcggtcaatcaaggtggcgacgatgatgatcgcggcaaacacgaacaacaccatcttggccagttgcacatagcctttgatcgaacgcgtgcgtgcgtgttcggtgcgcgcatagatgtccagcagcgcattgagcagggcgctcacggccagggtcatgaacaggatggtgaaggccagggccacattgccgataaacagggtggcggttttgctgaggtccggcaccaggtacaggccgaattggatcaccagagagggcgtcatctgcgccaggcggtgaaacaccttgttatgccgcaggtcgttgagccaatgcagcgccggttgccggccgagcaatttcacggcgtgcagtatcaagtagcgcgccacgcgtccgagcagcagggcgactaccagcaacaccagtaaacccaggctggaatgcaacaccgggtgttcatcgagggcgccccaaaggtcttggacgttacgccagagctgtttgatatccatgggtgaaaccgattcttctgtaagacaagacgggccgattagagcatttaagtgcaacaaagttggcgtcacggacaaaatcgctgacaaaaaaccagctgattggcaccgttcgcgtaaagaaactcggtttggacgcccgaaaccggtaacctatgccgctgatattttgtatttcttcgaggtagcacccgtgttttcccaattcgccctgcacgaacgcctgctcaaagccgtggccgagcttaaatttgtcgagcctacgcctgtgcaagcagcggccatcccgctcgcgctcgaagggcgtgacctgcgggtgacggctcaaaccggcagcggcaagaccgccgctttcgttctgccggtgctgaaccgcctgatcggtccggccaaggttcgcgtcagcatcaagaccctgatcctgctgccaacccgcgagctggcccagcagacactgaaggaagtcgagcgcttttcgcagttcaccttcatcaagtccggcatcattaccggtggcgaagacttcaaagtccaggccgccatgctgcgcaaggtgccggatatcctgatcggtacccccggccgcatgatcgagcaactcaacgccggcaaccttgacctcaaggaagtcgaagtactggtgctcgacgaagccgaccgcatgctcgacatgggctttgccgatgacgtgcagcgcctggtgggcgagtgcgtcaaccgccagcagaccatgctgttctccgccaccactggcggttcgaccctgcgcgacatggtcgccaaggtcctgaacaaccctgaacacttgcaggtcaacaacgtcagcgacctgaacgcgaccacgcgtcagcagatcgtgaccgccgaccacaacgtgcacaaagagcagatcctgaactggctgttggccaacgagacctatcagaaagccatcgtgttcaccaacacccgcgctgcggccgatcgcatctatggccgcctggttgcccaggaatacaaggcgttcgtgctgcacggcgagaaagaccagaaggaccgcaagctggcgatcgatcgcctgaaggcgggcggcgtgaagattctggtggccaccgacgtggctgctcgtggccttgacgttgatggcctggacttggtgatcaacttcgacatgccccgcagcggcgacgaatacgtgcaccgtattggccgtaccggccgtgccggcaacgatggcctggccatctcgctgatctgccacggcgactggaacctgatgtcgagcatcgagcgctacctcaagcagtcgttcgagcgccgcaccatcaaggaagtcaaaggtacctacaccgggccgaagaaggtcaaggcctctggcaaggctgttggcgtgaagaagaaaaagaccgacgccaagggcgacaaaaagaaaaccggcgccaagtcgccgaccaagcgaaaaatcgccaaccggccgaagaccgacaacctgtcgctcgtcagcaaggacggcatggcgccgctcaagcgccgcaagccagaagcgccggctgccgaataagcccgcgctgatatgaaaaaaccggacgatgtccggtttttttatgggcgcgatgtgtggcttcgtctgctggactgaacgcggctgggtgcaacctgtccaccggttaacgggccactttttcactggcccacaggaggaatcaggatgacgacttacaactgggatttgatcgaacgtctgctgcatgaagtgcagaacggcgacggcagcttcgcaccgcgcaaatacgccgagcaggaagcggctgagaaggccacggcgggtgagtccaccggtaatctggatgcgctgaaaaagaccgctgcggactatgaagcgttgctgttcaagcgcgggtttattgaatcgcgcccgcaggaggagggcggtaacggtgaaaatttcatcctgaccgcgctgggtgcgcaattgttggcgctgattgatagctcgattccgggcaatgaccacccgcgtcaggtgctggatgagcaggcagatgcgctggatccggcgacgtttgcggtagtggcgtccaagccacagattgcgtaacgaggatcaactcaaatcaagtgtgggagccgggcttgcccgcgatgcaggcaactcggtctgcctgccagaccgttgtgatgctatcgcaggcaagccagctcccacacaagttcacctttttaggtagaggaagccttcaggcatttgagtgccttgaagtcgctgcgcaccttgtcgatcttttgggtcagcttcaagcgttgttgccgggtgctctcggccatcaggtcgacgatcaggctgcgggctgccgcctccgtctttgcgtaggccagtttgtattccggcgtccacaggctttcgcggtctaccaataactgctgaattttctgcgggaagtcggggctgcggcggtgctgcacggcgtcgataaattgcgcctgccaacgcgcgcggttgccgatccactcctgattctgatcgcccaaggcaatcgaccaagcggtgacgcggttttgctggctgtcactgagtggcccaatccacgcatccaggcgcttgctcatgcgctctgcgcgctccttgatctgctgcgccaacggcggcttgaggtattcgtcctggcgcttgcgcaaatccttggccagggcgtcgctcatttccttgacctgcttgtcgtccagcccttgcagtaactcgacggccgacggggtaatggtgcgagcgatttcggcaatcgcctgtttggcttctgtggtgcgtgcttgcagcgcgacgtcggtgacctggttgttatcgaccatctgttgcaggcggtcgagccaatccaggtaacccggtaattgtgtagtgcaatgccaggccaggtgttccttgagcgtgtcgttgaaccagcttttctgcccggcattcatgtccaggtagtcgttgagggtccaagggatgatcacgtcgaggttgcgataggccaggcccacgcggttgcacgcggtgagcgccaggctcagggtgagcaacatcaccagcagtttgagccgacgcaacatgggcaggtccttgcgcaatgaggggtatgcatgtgaacccgcggcgagcgcgacagttcagcccatcaataaaacgaccgtgcggccttcaaggtcaacaggccgtcgcattgcgaattgtgtccggaataggccgagcaatcgccgccgctgaggctggagtcgctgtaaataaggtccaggtcaatgcccttccaggcgcgggagaactgaatcgaccaatcgctgaagctgctgatggacccgccctccaccgacaccgggctgcccagttggtgggtggtgtatttcatgctcacgccgatgccaaagggctgagtgccgccgaggtcggcaaacagggtgctgtcctggcgggccgggtcattgctgaaggaggcgccgaaccggttgcccagcaggttcaggccgccgtagaactcctggctgtcgagggggctgagcttggggtagctgtaatggatcaggccgacttcgtagcccagggtctgatcgaaagggtgtttgaagcccatataagaatcgacttcgaggttgttggccgaagacaggcccatattgggtgagaactggccgaaatacaggccactgtcatggctcaaatcgaggccgccatgaaatgagtcgcttcccggcgaggtcggtttgaccagaccctgggccatgctgcggctgggggtggtgcccaacttcaggtcgaagtcgcccagttcgcgctgaaagatttgcgcttcggcgagagggctggctgccagggccgcgacgaggaaaatgcagggtttgaacacgcgtcactccatgaaaagcgaggagcagtaacggaaaaatcgggaagaagcccgtgccagacgtgtgcaagcataccggtgaatgccggtggatgaggcccgttcgtcgatttgcacatcagagggtagagcaggagggtgtttcgggctctagtcctagcgccttgatgacaagacgcttagggaccaggtgtcgtgcgcaggttttactttttgcccaggctgatttgcttggacgggccgaaagtctggccgctcacgcccttggcaatttgctggatttcgccaccggacttgaggaacgcagcaatctggctgttgatcgattcgctggtttcaacggcgggagctggctttgctttgctgttggatgcttttacgcgcatggcggccactaacctgtagaaaattaacttggccaggcatcgtacaggaaatacttgacaattgcttggcaaatatcccccgggaataatgagcgtgatgggaaacagccagagtttattcgggaggcaagcccgtaacttactgttttaactggaaaccatagcagcagagccgccggcatccgggaaaaattgaattgtttgatcagacgagcggggcggtgccagtagaacgccacgccagcccttgatttttcaggtgcgcgcgcgccctggccacaactcgggtagaatgccgcccacgtaacgagggtatctggaaatggctttagtcgggcgctacaacagcttgcaagtggttaaacacactaactttggtttgtacctggacggtgcgcaagatggcgaaatcctcttgcctaatcggtatatccccaaagatattcccagtgaagatgaagactggcttaacgttttcatttatctggacagcgatgacaaacttatcgccacaactgaaaaaccgaaagttcaagtgggcgaatttgccagtttgaaagtggtggaagtcaacagcatcggtgtattcctcgattggggtttgccaaaggatttgctgttgccttattcggaagaaaaacgccagttgagcgccggtgaatattgcgtggtgcatgtctacctcgacaagcacaccaaacgcatcacggctaccgcgcgcctggatcgctacctggacaaaaccccggccaactatcaggtcggccaggaagtcgacctgctggtggccgaagccaccgacatgggcttcaaggccatcatcaacaacaagcactggggcctgatccacaagaacgaagtgttcaagttcctgcgcccgggcaaagaagaaaaaggcttcatcaaagaaatccgcgctgacggcaacatcagcctgagcctgcagccggtcggccaggaagcggcgtccagcctgaactcgaagatcctcgccaagttgcgcgaaaacaacggcaccctgccggtcagcgataaaagcgacccggcggtgatcagcaacttgttcggcgtcagcaagggcaacttcaagaaggccatcggtgcgctctacaagcaggggcagatcgtcattcatgcagaccgcattgaactaagctgatcggtactcgctcttctgtaggcgcccatcggcgcctacaggagtggtcacaatgtccagaaaagccctcttcgcctacctcggcaccttgcttgccttcctcgtgctcgatggtctgtggctcggcgttctcatgggcccgacctacaaaggcctgctcggcccactgatgcttgatcagcctcggctgtttcccgccgtgctgttctatctcctctatgtgattggctgcgtggtgctcgtcgtcctgcccagtggcggctggcagcgcgctgcacgtctgggggcattgctcggcctcgtcgcttacggcacctatgacctgagcaattgggccacgctgcaaggctggtctgccggcttggcgatcatggacatggcctggggcacattccttaccgcaacgtgctgtaccgtcggttacctgtgtgcagatcgagtgcaaaggtgattgtgtacaggatttcagtgcaccgttgctgagcgtagtccctgttttccaactgccttaaccccctttggagcgccagctcatggggattgtgttctattggcacgcattctgctgaatgcctcgtatacaaaccatgccgcctcccgtatgcatcctgttacggaagtgcaggccggtatttcgaggagcccagcgatgaccgaacaattgcccaaaggctacagcccgcgtctgtataacaaagacctgggcccgctgccgcagacatggaactggtacaacatcttcgctttctggatgagtgacgtgcacagcgtcggcggttatgtgtttgctgccagcttgttcgcgcttgggctggcgagttggcaggtgctgatcgctttgctcgccggtatttgcatcgtgcagatgatcgccaacctggtggccaagccgagccagcaagccgcggtgccgtatccggtgatctgccggctggcctttggcgtgtttggcgcgaacattcccgctgtgattcgcggcctgatcgccgtggcgtggtatggcattcagacgtacctggcgtccagcgccctgatcatcgtggtgctgcgcttcttcccacagatggcggtatacgccgagccgcattttgcgggcttgtcttacctgggctggatggggttcctcagcttgtgggtactgcaagcggcggttttctgggctggcatggagtctattcgccgttttatcgattgggcggggcccgtggtgtacgcggtgatgtttgccttggcaggctggatcgtatggaaggccggctgggcgaatatcaacttcacgctgtcggaaaaatccctgtcgggctggcaagctttcggtcaggtgattgtggcgacggcgttggtggtttcatatttctccgggcccacgttgaatttcggtgatttcagccgctactgccgcactatgcaggacgtgcggcgtggcaacttctgggggctgccggttaactttctggcgttctcgctggtgaccgtggtgatcgtgtcgggcacgttaccggtgtttggcgagatgcttcacgacccgattgccaccgtttcacgcatcgacaacagcatggccgtgctcctgggcgctttcgcctttgtcacggcaaccattggcatcaacattgtcgccaacttcgtctccccggcgtttgacttcgccaacgtcgcaccgagcaaaatcagttggcgcgcaggcggcatgatcgccgccgtggcctcgatctttatcacgccgtggaacctgttcaacaacccgctgatgatccactacaccctggacatcctcgcggcgtttatcgggcccttgtttgggattctgttggtggactactacctcatcaaaaagcagcagatcgatgtggacgcgttgtttgatgacagcccgcgcgggcgttattacttcgacggcggtgtgaactggacggcggtcaaggcgttggtacccgcgacgctggtcggcgtcgcgattaccttcaccccggcgttgcagggcatggccaactttgcctggtttaccggctgcttcctgggagggctgtttttcctggtgctggctcggcgagagcaggttcgcctccctgcgccactggttgtcggctgaccaatatcgcgcccgccaatagcaagccgcagccggcgacgaccaaagccggttgcaggccaccactgatgtggctgctcaccgaagccagcaacgggccacttaattggccgatggcaaagctggcggtcagcagcccggtgctgcgctggtagccgtggggtgctacctcacgcaggcgggccatcaccagctgcatgcaggccaggaacggcccgccgcacagcaacacgcccagtgccaggccccagccattgccgagcaggcaggcaaacactccgcccgcttgcagccacaaggtggtcatgagccagcggcgagtggtctccgggtctttgcggcgcaggctcgccactaccacacccatcgctgccgccagaccaaaacacggccagaacaggtcggcttgccaggcgcccttgaattgcgcactggccatctgcgacagaaacgtcgccgggatgatgtagcccaagccatacagcacataaatccagcacaggtgcgcaatgctgccgttgctgcctgcatcgtcatggctggcgaccggcgagccggcggcggagggtttgggcagaaacggcaggatcgccagcaacatcaccagcgccaccacgccgtagaccagccacaaggttgcagagtcttgcttcagcaaattggagcccagggccagcaagccggtcagcaggatccccagccccggcccggcaaataccagggcgcccaggcgagggcgtccggcggcgattgccagcggctggctcaagctggtgatcatcaccaacgcccaggcactggctacgccggtgccaaagcgcaacagcaaatgtggccagaaaccgtgggcccagtaagacgcgaaggtaagcagcacgcacagccaaagaccgccatacaagcgcccgcgtacgtggtgatggctgcgcgcgaagatcgaatccaccgcgcctacgaagtagcccaggtaattggcggcagcgatcagcccggcgccggtcaggtcgatctgcccttcgctgagcaaatgcggcatctgtggcgtgagggcgaagcggcctatgcccatggccatcatcagggcaataaagctggcgagtaagcgaatcaggggggacatgcttgggtttcctgtaggaaagcgaatgaccttcaggctaaagccgattgactttctgtaaaaatgaataatagtgagtaacttgttcagttttggagaaaggtatggagttcagtcaattgcgcattttccaggccgtggcggaagagggctccatcactcgcgcggctgaccggctgcaccgcgtgccgtcgaacctgtcgacgcggctcaagcaaatggaagagcagttgggcgtagagctgttcgtccgagagcgccagcgcttgcagctttctcctgcgggcaaagtgctgctggactacagcacccgcctgctcgcgctgcacgacgaagcccacggcgcggtgcagggcgggcaaccggccggggattttgtagtgggcagcatgtacagcacggctgcggtgcatttgcccaagctgttggcgcgctatcacaaggcctatccgatggtgaaccttcaggtgcaatcggcgcccagtggtgaactgctcgaaggtttgatcaccggccggttggacgctgccttcgtggatggcccgattaccatcgcctcccttgacggcgttgcgctgtgcgaagagcggctggtgctgatttgcgaggccgatcacccgccggtacgcgggccgcaagatgtggccgggcgttcggtgtttacctttcgtcgcagctgcgcctaccgcgcgcggttggaaacctggttttcccacgatcgcgtggccatgggccgggccattgagatcgagtcctatcaaggcatgctcgcctgcgtgatcgccggttccggcgtggcactgatgtccgaatccatgctcgacagcctgcccggcaaggacagcgtgtccgttcatcccctgaccgggccttttgccactgctaccacctggctgatgtggcgaaagggtatgctcggcgctaacctcaacgcatggatcgacctgcagcaagaagacaaggccgagttcctgcaagatgcacgcgcaattgcttgaacgatccgtcaggattctgatcaatccagtaatagttcgttgtggtttcgttcaagcattacgtaggacttagggctactatcacagtaggaaaaggcgacacaaccctcgccgactcgcaccaccctcaaagggggcaaccatgaaagagaaaattcaaaactggctccacgacctcggcgttgcgctgggcctgatcgagcctccgctgcaaccggtgccgattcgcacggatgacgagcagcgccggccgcgtcgcaggtaaattctgaagcgctcacacgatcctgggttcggttgtgtgagcgctaacgaggtggatgttattcaggtgccaggtggacccctgtaacccaggcgcagccctcctttaccaccagccctctctgaacgtccgacgaatcgagacccgatgtcggacccttcctgttgtttcgtcatctgatctttttccccgttcgatcttctatattttcttcttctcatggaggaaaggcgttgatatgtcgagcatggatagtgaaggaatgttgatttccggcaaggtcgaacatcgtcgattcaaaacgattgagcagggtgatttgcgcagcgtcagtgcgctggtagtccaccagacggatgcaccgactgcagagcacacgttcaatggctaccgctccaaagggaatggggctcattttctaatcgaaaaaaatggtgtgatttaccagaccgccagtatgaaaaagcgctgctttcacgttgggcggttcattcgatcaaaatgcatggccgttgataaggcgtcttgcgacgctgctcaaatgaccagaattcatacactttcgtggacgttgcagatccgggccttggatcgccacgagcgcacgaagaactaccctgagcgatacccgatgaattcggattctctgggtatcgagttggtcggcaaacatttggatgcagcccggtacgaggccattacggctatgcagaaccagtcccttcagtggctggtctcagcgttgttcggtcactacggtctgacctcggcagacgtttacacgcacccgcaaatctcttacaaacaccccggcgaagccagcagtgcggtgtggcaatgaggagcgtgtgtctttcgttgagcgtgctgatagcgggatgttcgcccgcccctcaagatttcagtgagatatccattagccgctttcaatccgaagaacctgaacgctgccgcccgtcagacgttggattgaatgagcaacaggttgtggcctttttcaggcgtgccgagcaaatcgatgcccgaacgctgcataacgaatacgactgggcgccttgctaccttgagggcactttgaagtttcaggggcaggcgtgtagctgggaggtgagggcgggtgggacggggcagattggatgcctggcaaccgagcagtattttggctgcaatgactgcggcgatttgttcgaaggcgtcaaaccgtagcaccgaatgacaaaaaaacgggtgtggcatccgacgccacacccgctgaagaaaccgctttaaaccctgtcagtcatcaaaccgcccgggccgcctcggcctgggggctgcgcgacagcaaactcaccaccacaaaactgaccaggccaaccgccaggctgtagtagatcggcgtgttcgcgtccaacccatccttgaacatgaacaccagcgcagtcacgaagccgagtgtcatcgacgcaatcgcccccgatgtggtcgcgcgcttccagaaaatcgcccccatcagcggaatcagcatgccacccaccaacaggttgtaggccagggtcagggcgctgatcacgtcgtttaccaccagcgcgataccgagtacggcgatgccggtgagcagcgtgaacaggcggttgatgttcaggctcgactgtttaccgccgcgcaggcgtggcaacaggtcttcggtcagtacggtggaggcggcgagcaagccggcactggcggtggacatcatcgcggccagtgcagcagcaatcaccaggccgcgaatgccgtccggcagcgaggctttgacgatggcggcgaatgcgttgttgacgttgtccaggtctggcagcagcacgtgggcggccatcccgatcagcgcgcaggccaggccgtagaggatgcagtagaaaccggcgaatgtgcctgcgtacttggcgaccttttcgtcacgcgcggtgaacacgcgctgccagatgtcctgaccgatcaggatgccgaagaagtagatcatgaagtaggtgatgatcgtgtcccagccgatttcggtgaagctgaaattcgacgcaggcagtttggccaccaactcatcccagccgccgacgcggtacaggcagatcggcagcaagataaacatcagccccacggtcttgatcacgaactgcacgatgtcggtcagggtcagcgaccacatgccaccgatggtcgaatacaccaccaccacgccaccgccgagcaacactgaaatccagaacggcaggccgaacaacacttgcagcacggtgccgatggcgaggatcgaggtcacgccgatcatcaaggcgtaggccagcatgatcaccgcgctcgcttggcgggccatggggttgtagcgtttttccaggacctgggtcacggtgaagattttcagcttcagcagcggcttggctaggaacaggttcagcgcaatgatccctgcacccagcgcggcgcacagccagaagccggaaatgccgtgcacgtaacccaggcgtacggtgccgacggtggatgcaccgcccaataccgtggcggccatggtgcccatgtacagcgacgggcccaggttacgcccggcgaccaggtagtcttcgtgggtcttggcgcggcgcatgccgtaatagccgagcacgagcatgccggcggcgtagatgagtacgacgaataaatccaaagccatgacggcggttctccgattatcttttttatgagcgatcaggcggcttgttgcagcgccggtttaacgcgcgcatccgtgcgcttgctgcgagggtccgccgggccgtagacagcggccggttccggaaacacgcgaagcaaggtcaggtacaccaccgatgccagtcccagcgtcaccggcaggctgatgtcgatgccgtcggccaggttgcccagcggcccgacaaactgacccggcaggttgacgaagcacaggcccaccagcgcactcgggatccacgcgcccagcccgcgccagttccagccatggctgaaccagtagcgcccaccagtttcaccgcgggtgaacacttgcaggtcatccgggcagtagaagccgcgacgcacgatcaggccgatgatcatcatcaccatccacggcgtcgtgcaggtaatgatcagcacagcgaaggtcgacacgctctgcaccaggttggcggcgaaacgtccgataaagatgaaggcaatcgacatcacaccgatcagcaacgtggccttgacccgcgacagcaagcgcggaaacacgctggacatgtccaggcccgtgccatacagcgacgtggtgccggtggacataccgccaatcactgcgatcaggcacaccggcaggaagaaccaactcggtgccaccgccagcaaaccgccgacatagttgttggccgcaatatagtccggcgccttgatcgccacgatggtcgcggtggccaggccgaacaggaacgggatcaaggtggcgatctgcgccagcaccaccgccgccatgatgcgcattttcggcgtctcgcgcgggatgtagcgtgaccagtcacccaggaacgcgccgaaggaaatcgggttgctcatggccaccagcgcagcgccgataaacgcagcccagaagccggtctgaccgagtgcgacggtaccggcgaagtggctgtcgaaggccggggcgaaggcgaagatacccagcaggaacagcaggctcgccgcccacaccgcaatgcggttgacccacagcatgaagcgaaagccgtagatgcaaacggtgagaacgaggagggcgaacaggccgtaagccaggcccagggtcaggtcagtttcaggcaggcccaccagacgtttcgcaccgccgaccaacgcatcacctgaactccacaccgacagtgagaagaaggcaatcgccgtcagcaatgacagaaacgagccgacgatccgcccgtgcacaccgaagtgcgcaccggaagacacggcgttgttggtgccgttgatcggcccgaacaggcccatgggcgccaggatcagcgcgcccaccagcacgcccagcacaatcgcccagacaccggcctggaacgacaagccgaacagcaccgggaacgagcccagcaccgcagtggcaaaggtattggcaccaccgaagatcaggcggaacagatccttggggccggcggtacgttcgtggtccgggatctgttcgaccccgttggtttctatttttcgaatacttttatcgttgtttttattattcatgatcagctccgatcacattggctaagggggcggcagcccttccggcattgcggacaaatgttcgtgacaggccagccacaggccttcttgttgttgtgtgccagacccttgccgtttgaagacaatggtctcgcgctcctggctaaagaattgctccccgttcatgcgcagctcggtggccacgtcatgaataaaaaccgccacgtcgccctgcaggctgacaaaagcgttgctcgaggtgcatgacagcacctcgaacccctcatccgcgcgccagctgtcccacaaggcctggtaggcatcgcggctcagcaacggttgggggagggtgtaaaacacaaagctggcatccacggtgaacgcgccgaaatacgcggcgcggtcattgcgggcgaacgccgacaccaggtcggcggcggctttgagcacggcttgcgcactcatcagcggtgcgccacgccgggcagtacgcagagcatctcgtacagcaggttggcgccgagcagcgaggtgttgccggtggtgtcgtacggcggcgagacttctaccagatcgcaaccgaccaggtcgaggccctggcagccacggatgatttcgatggcctgaatggtggtcagcccgccgatttccggagtaccggtgccaggtgcccatgccgggtcgataccgtcgatatcaaaactcaggtacaccgggccgccgccgactttctcacgcacttctgccatcaagggtgccagcgagtggtgccagcattcttcggcctggaccacacggaagccctgtttgcggctccagttgaagtcttcggcggtataaccctgggcgcgcaggccgatctgtacgacgcggtcgcagtccagcaaaccttcttccacggcgcggcggaaggtagtgccgtgggcgattttctcgccgaacatgtggtcgttgacgtcggcatgggcatcaatgtgcaccagcccgaccttgccgtgtttcttgtggatcgcccgcaggatcggcagggtgatggtgtggtcaccgcccagggtcatcgggatcacgtcgtgctcaaggatctcgtcgtaggcttcttcgatgatgcgcacggcgtcgagcaggttgaaggtgttgatcgccacatcaccgatgtcggcaaccgacaacgagtcaaacggcgcggcgccggttgccatgttgtaagggcggatcatcacggattcggcgcggatttcacgcggcccgaagcgggtgccggcgcgcagcgaggtgccgatgtccaggggcacgccgacaaaggcggcgtccaggcctttggccgtttgcaggtggggcaggcgcatcatggtggcgatgccggcgaagcgcggcatttcgttgccgcccagtggttggtggaaaatcttgtccacgggaatgcctcatcgttgttttgtttattagaggccgattctgcgaaaagcccggagcgggaagaatcggcagaggcaaatacttagttcagatttttctaaactaacggctgaggtaaactccgttcaaatgtgggagctggcttgcctgcgatagcggtctgccagccacccttcctttattgatccaccgctatcacaggcaagccagctcccacattgggattgcggtgcctcaggtgtttctggagaaccgatggccaacgccttgcccgacctgaaactcctgcgcatcttcgtcagcgtcgtgcgccatcaggggtttgccaatgcccagcacgagctcaacctgtccacctcggccatcagcacgtatatgagccagctggagtcggcgttgggcctggtgctgtgccatcgcgggcgaggcgggttcagcctgaccagtaagggcgagctgttccatcaggaaaccctgcgtcttttgggcgagctggaaggcttcgagcagtacgccgccgcgctcaaaggcgagttgcgtggcaccctcaagctcggcgtgctcgactccaccgtcagcgataacgcgttgccgtttgctgaggcgatcggcgcgtacagcctggagcacccggcggtgcacctgcatttgtcggtgatgagcccttacgagctgcaactcggcgtgcaggacaaccgcctggacctggccatcggctgcttttccaaccgcatgagcgggctgatctatatgccgctgtaccgcgagcaacactggctgtattgcagcacccggcacccgttgttcaacgagcggcgtattcccgaacaggtcatcacccagcagcgcatggtcggacgcggctactggagccaggcggaactggcgcgtcacggcttcaagcacagcgccgcgacggtggaaagtatggaggcgcagctgattctggtgctgtctggcgcctacatcggctacctgcccgagcattatgcccaggcctgggctgacaagggtgacctgcgggtattgctgccggcgacatttggttaccaggcgcccttctcaatgatcattcgtcgtggccgcagccgcgagccgctgatccagacgttccgcgatttgctcaaagcccagctcaatcaggcctgaaatgatgtccagaccccaatgtacccgctgcctgcggcccgttacccattgcctttgcccgctgattccgagcctcgacagccgcacccgggtgttgctgttgcagcaccccagtgaagttaaccatgcgctgaataccgcacggctggcggcgttggggttgaacaatgcgcagttggtggtgggggaagtgtttgaagacctggcgaggttgttgagcccccccggttatcaggcgcggttattgtttcccgatgacgatgcccagccgctgcaagcttatgcgcccagtgaccagccgctgctgctggtggtccccgatggcacctggcgcaaggcgcgtaaattactgcacctcaatccgttgctggcggcgttgccccgcgtgagcttggccgagggggccgagtcccgctatcgactgcgcaaggcgccagggccgggggctctgtcgacggtggaggcgattgtgcaggccctggaggtgctggaggctcccaattcatttgcgccgctgctcaaaccgttcgacgcgttgatcgaggggcagatagcggcgatgggagaagaggtgtttcagcgtaatcatggcgacgggcggtagggttggcaggttcaccgaggtgcggctatcgcaggcaagccagctcccacatttgaattgcattcttctcctgaaatgcattcccttgtgggagcaggcttgcctgcgatggcgccttcgcagccaacacattacctgcttattcctttaagccataagcaccacactttgcgtgatatggcccgccagcctttcccggtatgatgttcgcccccgcagtctggattgcgaatacgccatgaccttgcagtaccctacaatcgccgattgcgtcggcaacacgcccctggtccgcttgcaacgcatggcgggtgaaaccagcaacaccttgttgctcaagcttgaagggaacaacccagccggctccgtcaaggaccgcccggcgctgtcgatgattacccgcgccgagctgcgcgggcagatcaagcccggcgacaccctgatcgaagccacctcgggtaacaccgggatcgccctggccatggccgccgcgatcaagggttacaagatgatcctgatcatgcccgacaacggcagcgccgaacgcaaagcggcgatgaccgcctacggcgcccagttgatcctggtcacccaggaagaaggcatggaaggcgcgcgtgacctggccgagcgcctggccgccgaaggccgtggcctggtgctggatcagttcgccaacggtgataatcccgaggcgcactacaccaccactggcccggaaatctggcgccagaccggcggcaccatcacccatttcgtcagttcgatgggcaccaccggcactatcatgggcaattcgcgctacctcaaggagcagaacccgaacgtccagatcgtcggcctgcaaccgatggaaggcgcggccattcctggcattcgccgctggcccgaagagtatctgccgaagatctacaacgcgacccgcgtggaccggatcatcgatatggcccagcgtgaagccgaagacaccacgcgtcgcctggcccgtgaagaaggcatcttctgcggtgtgtcctccgggggcgccgtggccggtatgttgcgtttgtccaaagaactggaaaacgcggtgatcgtcgcgatcatctgcgaccgaggcgaccgctacttgtcgaccggcatcttcgacgaacccaactgatggccaagcacgagagaggcctgcgcttccaaccgacgggcggcagccgggccccgcagattcctgtgggcaagaaacaacgcctgaccattgaacgcctggccaacgatggccgtggcatcgtgtttttcgaaggccgtacctggtttgtgaatggcgcgctggccggtgaagaggtcgaggcgcgagtgctgggggctcatggcaaagtggttgaggcccgcaccgagcgtgtgttcaaggccaacgaactgcgccgcccggcaccctgtgcccacgttggccgctgtggtggttgcagcgtgcaacacttgccccatgctgaacagcttgccctgaaacagcgcatgctcgccgagcaactgtcccgtgtggcgggtgtcgaaccgcaagagtgggcggcacctttgagtggcccggagtttggctaccgtcgccgcgcccgcgtggccgtgcgttgggacgccaaggcgaaacatctggaagtcgggtttcgcgccgtggccagccaagacatcgtcgccatcgacgattgcccggtgctggtacaggccttgcagccgatcatgcagcgcttgccgaacatgttgcgccgcttgagcaaaccgcaggccctggggcatgtggagttgttcagtggtacgtccatcgcggtgttgttgcggcacatggcgccgctgtccgaggcggacctgcaggtattgaaagagttttgcgccttccatgaagcccaattgtggctgcacggtgagggccagcctgagccggttgaggccggctccattctgggtttccgcctggaacagtgggatcttgagttggcgtaccggccgggtgacttcgtgcaggtcaacgccggggtcaacgcagcgatggttgcccaagccctggaatggctggcgccgcagcccgaagagcgggtgctggacttgttttgcgggctgggcaattttgcattgccactggccaaacaggtgcgggaagtggtggcggtagaaggcgtccagaccatggtcgaccgcgccgcactgaatgccgtcagcaacaatttgcataatacgcagttttttcaggccgatttgtcccagcctttgactgacgcacaatgggccaaacagggcttttctgcggtactcttggacccaccccgtgatggtgcccttgacgttgtgcgtaagcttgccacgctgggggccaagcgtttggtgtatgtgtcctgcaacccggccacgctggcgcgggacacggttgagttggtcaagcaaggctaccggctaaagcgtgccgggatcctcgacatgtttccgcaaacagcgcatgtcgaggccatggcgttatttgaagcgggctaggatgcccgtttaatccgaccggcctgtcgtctccagggcctgtgatctgccagggagcagtagaaggtcggcgatgaattctggcgcatcgaaggtgcgtcgtagggaaggtaagcaagatggtacaggtgagagcacaccagccgatcaacaccgacggcagtatcaatctcgaggcatggctggatcatgccgtcagtgtcgacccggcactggaccgtgaagccttgaaggccgcctgcgagttcgctcgtgagtcggagcaacaagacaatgcggccaagaacctgtgggccgaaggcacttcaagctttcgcaccgggttggaaatcgccgagatcctcgccgatctcaagctggaccaggattcgctgatcgccgccgtgctctatcgcggcgtgcgcgaagggcatattgcgttaccgctggtcagccagcgcttcggcgccgtggtcgccaagctgatcgacggcgtgctgcgcatggccgccatcagcgccagcctcagcccgcgccaatcgatggtgctgggcactcagggtcaggtcgaaaacctgcgcaagatgctggtagcgatggtcgacgacgtgcgcgtcgcattgatcaagctcgccgaacgcacgtgtgcgatccgtgcggtaaaaaccgctgacgacgagaagcgcaaccgtgttgcccgtgaggtgttcgacatctacgcgccgctggcgcaccgcctgggcatcggccatatcaagtgggagctggaggacttgtccttccgctacctcgaacccgatcagtacaaacaaatcgccaccttgctgcacgagcggcggctcgaccgtgagcgcttcatcagcgatgtgatgggccagttgcgttccgagttgcaggccaccggcgtggatgccgacatcagtggccgcgcgaaacacatctattccatctggcgcaaaatgcagcgcaagggcctggccttcagccagatctacgacgtgcgcgccgtgcgcgtgctggtgccggagatgcgcgattgctacaccgcgctgggtatcgtccacaccttgtggcggcacattcccaaggagtttgacgactacatcgccaaccccaaggaaaacggctatcgctcgctgcacaccgccgtgatcggcccggaaggcaaggtgctggaagtgcagatccgcacccacgccatgcacgaagaagccgagctgggcgtctgcgcgcactggcgttacaagggcaccgacgtcaaggccgggtccaaccagtacgaagagaaaatctcctggttgcgccaggtgctggaatggcacgaagaactgggcgacatcggcggcctcgccgaacaattgcgcgtcgatatcgagccggaccgggtctacatcttcacccccgacggccacgccatcgacttgccgaagggcgccacgccgctggattttgcctaccgcgtgcacaccgaaatcggccacaactgccggggcgccaagatcaacgggcgcatcgtgccgctcaactacagcctgcaaaccggtgaacaggtcgagatcatcaccagcaagcacggcacgccgagccgcgactggctgaacccgaacctgggctacatcaccacctcgcgggcgcgggcgaagatcgtccactggttcaaattgcaggcccgcgaccagaacgtcgccgccggcaaaaccctgctcgaacgcgaactggcacgccttggcctgccgcaggtggacttcgacaagctggccgaaaaggccaacatgaagattgccgaagacatgttcgccgccctcggtgccggtgacctgcgcctggcgcaactggtcaacctggcgcagcaactggtcgagccggagcgcggcagcgagcaactggaactcatcccgcgcaaggctaccggctacaaaccgggcaagcgcggcgatatccagattcagggtgtgggcaacctgatgactcaaatcgccggctgctgccagccgttgccgggtgacgccattgtcggttacatcacccagggccgtggcgtgagcattcaccgccaggattgcgcctcggtgctgcaactgggcgggcgtgagccggagcgcatcattcaggtcagttgggggccggtgccggtgctcacctatccggtggacatcgtgatccgtgcctacgaccgttccggtttgctgcgtgacgtgtcgcaagtgctgctcaacgagcggatcaacgtgctggcggtcaacacccgctcgaacaaagaggacaacacggcgttgatgtccctgaccatcgagattccggggctggacgcattggggcggttgctggggcggatttcgcagttgccgaacatcatcgagacgcggcgtaaccgtaccccctgaaggccaactggaagtgtgggagccgagcttgtgtgggggctggctcccacatttgatttgcgcagagattgactgatgtattcacttgaagacctgctgcacttgatgagccgcctgcgtgacccgcaatacgggtgcccgtgggacatcaagcaaacctacgcgaccatcgtgccgcatacccttgaagaagcctacgaagtcgccgatgccatcgagcgtggcgactttgatcacctgcaaggcgagctcggcgacctgttgtttcaggtggtgtattacagccagttggcgcgggaagaagggcgcttcgaattcgcgggggtgatcgacagcatcacgcgcaagctgatccgtcgccacccgcatgtgtttcccaccggcgatttgtacgctccgctggatatcccgcaactgagcgaagagcaggtcaaggagcgctgggagcagatcaaggccgaggagcgcgcggaacaatccgacgctccggagcaactgtccttgctggatgatgtgccgaacgccttgccttccctgtcccgcgccgccaagttgcaaaagcgcgccagccaggtcggcttcgactggccgtccgcgttgccggtggtggacaacgtgcgcgaagagttggatgaagtgctcgaagccatggccgacaacgactcggcggccatcgccgatgaggtgggcgacctgctgtttgcagcggtcaatctggcccgccacctcaaggtcgatccggaaactgcgctgcgtggcgccaatgccaagttcgaacgacgtttccgatttatcgaacaggcattgcgcgatacccgtcgcgccatggaagattgcaccctcgaagagttggacgccctgtggggcgaagccaaacgtcaggaaaagaacatgtccagctgcggttgagcggctgccaaagtgagtaagcaccatgagcatttcccttcgcgaccagttgctcaaagcagggctggtcaaccagaagcaggccaagcaggtcggcaaagagaaacagaaacagcagcgcctggtccacaaaggccagatcgaggcggacgacacccaggcacgcatggcggctgaggcgcaggccgagaaggtcaagcgcgatcaggagctgaaccgtcagcagcaggaaaaagccgaggccaaggcccgcaccgcccaggtcaagcaactgatcgagacatcgcgcctgccgaagctgaccaccgaggactactacaactttgtggacgacaagaaggtcaagcgcctgtcggtcaacacgttgatgcgcaacaagctgagcaacggctccctggcaatcgtgcaccacggtggcggttatgaggtaatccctcgtgaggctgcgctgaaaatccaggagcgtgcaccggagcgtatcgtgcagctcaacctcctgaccgagactcaagtgccggatgaggatgatccgtacgctgcctaccagatccctgatgacctgatgtggtaagccgctaaacaacagcggtgtcctgcgtaattccccctggataagggtaaacaaagtaattgtggcgagggcgcaagctccctcgccacagtggctgtttacctgttctatcgcttagccaagccgatcaccaatccacggcataactcacgctgaaggtccgaccttcggcattcgggtacggcgcgcgggcgttggcctgggcaaacatgttctggtagttgcggtttgtgaggttgtacaccgcaccttcgagacgaccgaccggcagcctcaccgaaccgagcaaatcggccagggtgtagcctttgatatcgcggccgttgttgtccttgaacgcggcgtcatagtcatccaggcgcataccctgcaagcgcaggctgtagtcgccacggtcatagccgataaaggcggtggttttggccggggagatgcgcgtggcaggcaggtcgatccattggccgttctggcgggtttcacccttggcgtaggcataagtaccgcccaccgaccactggtcagtcacgttgtaggtcagggtggtttcaacaccgcgcacgcgctctttctgattgatcaggcgcaacacgcgatcattggcatcatagaactgggtgacgtccgacgtattttcatacgccgtgacgctggcgagccacttgtcccagttgccacgccagcccagctcgtagctgtcgactttgagtgcctgggcattcaggttttgaatgtcgtacttgctgttcacgtcacgcaggaaacgctggatatccggcagggaaaagccctggctgaagttgaagaacacgtcctggttttcgctcaggtgatacaccgccccgaggttatagagggtgtcatcgtatttgagcgtgccgcccggcagtgttgcgcgattgccggtctggacgatttcgccataggcgatgctgtcggacacctcgctctgaatccactcgcgacgtacaccgccgcgcagggtccagtcatcgatgtcgtaggacagctggccgaaaatggctttggtggtggtcgcaatgtccgggcccagttcgaaggtggtgccggtcttggtatagctcaggccgttgacccggtattggtcgccgcgctggcgtgaggtttcgtgatcgtaatcggcgccccagaccaggttgccggtcgcccggccgatgtccggcatttgcgtatcgatggctgcgcgcaggccatacacatcctgcacgctgttgttgtcggagaccccggcgcggccccgggacaggtcggggaaaaacagcgcgtcggcacgccgccagtaactttcaacctgcaagccctggccgtagaaatccttgtcggcgtagttgaggttgaccgcctggttatgggtgaacggttgatcgtccaggtccaggccttttaccgcgacggcggtgcctgtgatacgtgggttcttggtgtaacgggtgtcctgttcgtctttgtagtcttgcagcgacaggctgatcttcttgtcgtcatccagctcgtagccgaagcggccttgcaggtcgtaggtatcggtgtccatgttgctgccctgggacgtgtcctggggaatgcgcttgccgttgccgtcgaactggtcgttgcgttgcacggtgttgcccgagaggtaccaatccacggggccattgcggccggtggcgctttggaaggcgtcgtaggaaaaccctttgtggctgaagttgttgccggtggtcatgccgatcttgctgctgaacgccaggtcttcacccttgttgcgcttggtgatgatgttgatgatgccgcctgatgcgcccgcgccgtagacactgctggcgccggaaatcacttcgatgcgctcgatactttccggggccacgctgttgagctggcggaagttatcgcgcgtggcgttttgggacacgccatcaatcaggatcagcgtgttgcgcccgcgcagcgtctggccgaagttactcatgccgccgctggagggggcaatgcccggtaccaattggccgaggatatccgcgacgcggcggccggcagccgcctgctggcggatctgctcttcgttgatcacctgcacggagcctggaatctgcgcaatgctggtttcattgcgtgtggccgagactacggtggcctgtagttgcaggttggcgggcgctgcctgggtgtcctcaggctgatcagcccaggcgggggcgctgaacgacccgagaagcggcagcagaactgcccattgtgatttggtcatgaacttgcctttgagttattagaagtagtgacagaaaaaccggatgcctcgggtgttcgggtgaacgaacggatggcgcggatgcccccggcggcgagggcatacgtcaatgcgaccagccagaagctgtgccccaggccgaccattcccatgccgatgccaccgatcaacgccccgcacagcgccccagccttggcggcgctgttgcccagaccgagggcgaaaccctgctgggccggcgcaacggtgttggcgatcaaggtgtaggcgacaggcagcaacgccccctgccacacaccccacaacagccgactggcgagaaaccccagccattcgctggccagcgccgtgaaggctagcgtcaaggcgcaggaccacgtaacccactcgatgacgcgcagcgtgtgtgcgggttgatggcggtcaaacaggcggccccacagcggagcggacatcgccagggtcagtgcgctggcggcgtagctggcgccgatcagccacgcaggcgcgtgcaaaatgtcggcgacgtagagggcgtaaaacggttggggcatcatcttggcggcctggatcaacacgatgatgcccagcattgcgccgagccagcctttgggcagtgcgccgggttttgaggcggtgagggggcgtaatcgcggtgagtcgctgggcaggaacatgctgaccactgcgcacaaaaggcacacggcagtggcgctgtagcacagcaaggcaaagcctgaaacgtccatcaaccagccgcccagcaccggcccggccagcgagcccacggcggtggccgattgcagccgggccagaatgtgcccgcgcccgccgtccccgcagcaggccagcgcataggcttgggccgccgcaataaaccccgccagcgcaccttgcgccacgcgaatggccaccagtagccacggatcgaaggtgatggcagccagtgcctggcacgccgccaacgccagcagcgcgcggatgatcatcggcttgtggccggtacggtcgcccagccgcccccacatgggcgtgaggaccatcgccgccatcatcggcccggcatacaccagcgacgacagcaggccggtgtagtgggcgttggcagcaccaagcagcttctggatttgcagtggccagaaggggccgctcatttccatggcccccatcgacaccaactgaatcaccaccagcagccgcagcgcggtgtggttagcctgcattggcggtggcgctcagcgggttgggcagccgcccgacgatatcggcatggctttccagcagccgcatgcgcatgaacgatttggccggccagtcctgcaccagcagggcttcgcgttcggtctcccagcgctggggttcgaccgagctgcgcacgtcgtcgaagcactggctgacctgcgccgacagttcattccagagcaatgcctgggggatgtcgaaatgacgcgcgccaagcaataccaattcgcccaggtggcacatgaacaccgtgtgtagcagcttgtcgcgtacgaagcctgcgtcgtcgtacagggtcatcttcgggtcgtgcagttcaatatccaggccatgggcgtgcagggttttgcggtcgatgcggatatcaccgaagtcgcgcaacagcagtcggctcaattgcccgtcggcagccatgaccatgaaggaattctgctgatgcgcctcgaacgccacgccatagcgcaggtacattcccaacagggcgggcacggcgatggcggcatagtcgcgcaagaacgcgagcatggcctgcgcgtcgtcccggccctggctcaggcgaacccactgccccagcaacggttgcccgtattgatcgatcgcaaacaggctgcccaccggcacggccatttcgccaggttggagcaggctttgggggttgtcgcgatagagtacggccaagtgacgggaatgctcgtcattggcgggttggggcttgaaatgcacgccgatccgctcgggaacgatactgaggattttctgaagttcaggctcacgctccaggatcgtcagcagcagatgactgatccgcggccccatgcgcgccgaacgcggcgacaccgtgcgctgcacgctggtcagtcgcagcgacaccggaagtttgaccatcggcgcgtcgcagcggccttccggcagcacggtacggaaggacatggtggggtgggcggtgaaggcgataatatcggtcagcaccagcagcttgtcgccgatttcattggcgaacagttgcggcaattcctcccgtgcttgccaagggtgagcgggcagcggcaggtagtcgctcgcctcaaggccttgggcggccagtgttgcggtcaattgctgggccgcctgcgggaaatggttgctccaccacggccagtaatcggcggtgccggccaaggcttcaacatgcgcgtactggcgatgcagcgcacacaggaacaccgggaagcgcgcttcgaactctggcgagaaatcgatgacctgatcggtatccaggcccagcttggtcttgtagttggggtgccagggatggcccagcgtgccccattgttcaagcacggaagtgggattggtaatgtctggatcgttcttgagatggatcagcaggttgtcttgatgctccggggccatcgcggcatgcagcttgagcgaccattgctggtgaaacgccaggcacaaggtgtcgttgacgaagctatcgtcgatctcggtgttgaggcggctcaggacttgcggatctgcgggcgattcaagcgcgctgttgagcagtgacaataattgcgacgggaattgaatcttctgttcgggctgatcgtcacgcaggacggtgacctcgccgcgcaggtcccagctcgccatgcggccagggcgcagatggtcgaagcgcaggcgggtttggtcaggcagcgtcagccaacattgaccgtgctcgtcgcaggcccgagcgccgggggccagcaggccttctcggaagagtgcctggatcaggcgttggaagctgcgctcagcggcgggggccaaggtactgatcaaagaatcgagggtgatgtggctggcctggaactgcggtgtggcgagtgcttcgccccaacgctcaagcaatgatttttccggcgtcctgctgttcccgttcatcatgttgaactccttatccgtaagcctgagtgagaggcggcgggatactatcgagaatcattaccaaatgtctatttgttgttacattaattgcggaaacgattattcaggccgggcgaaatggggggtgtgcaaggaagatgctgggtcgctgaagagggaggtgcaagcgggaggcctctggaacaggctagttgagcgttttggcggggcttgtagtgcgggtcttcaatctttgtaggatgtatcgatttatacaacgatccctatgttgtcccaaaaagcgatgggcttgaaacgaaaaaccccgctcaaaggcggggtttttgtttgcagataatccagctgctgtgtggggctggatgcctgcgagatttcagagtttcaggagctttgtgcctggcgtttcagttcgagagtttcgagctcgtttttataattgtgggcttcgttctcgttgtgaaacatgccgaccagttggtcttgctgatgtacatcccagatgtgaatcccatggcccagtgcttcgtgagacatgtgtgcatcgtcgcgttcagttacttttacagtcatctgcttgctccaatctctggttgacctgcggcaagtcgtcgcaggcctcttttatatgttttgttagcttgctaagtaaacaggttttgcgcgcaacaattcattgcataaaacgcaacagtgctgcaggccacggatttcggggttttgtctcgcaggtacttgagttttatgacagaagtttcatgttcgaggcgggtcaatcagctatgtattggctttagcaccgccctcgcaggcaagccagctcccgcaggagaaatgcattccatctgtgggagctggcttgcctgcgagggcgatagaagctttaaaacaaaatgtgcagacgaaaaaaagccccgcattccgcgaggctctttcctgactcatcagcccatcaactgcctttgacagccttgccgtcaacggtgccgtccagcagcatgatgttgtattccttgccgtcggtttccacctggcgcagggcaaccaggatgccgccccagtctttggcaaaccacatctgggtgatgcgcttgctttgcgacgggtcacgcacgcgctcaaccttgatcgcatcaatggcgccggccttggtctgaaccttttccgggccgatcacgcggaagtcgtaggtgtcgacgtcggtgccttcgaccacgcggtagctcatgcttttcttgccggcggcaacgtcacgctgcagggcaagttggtaggtcgatttgtcgagcatgccactttcgagggtgacattgaccgggtccttgttctcgaaaccggtgactttcttggcggtctggtcgaagtccaggttgatcttcttggccttgcccaggccaccgcgttcgaaggagtagctcttcggttgcagggcgtccttgtcgaagttgataacgctggtttcggtgaggctggcgatcatcatggaagccttgaaattcaaggtccaggagccattgtcattcttggtcaggctgcgttcggccgaaccactcatgggcaactgtttccagtcggcggtgtagctggcggagaaggggtgaaggtctgctgcttgcacggctggcaaggcgaacagcgcaaaagcgaagagcaaggcgcgacgcataaaatctcctaggttcgaatcaagtggccgctggccgcgagtaactgaccgtccaataatgcaccctgttcgccaagaatcaaccggccctcggcaaaccagcgaacagccagtggataaatcttgtgttcctgggtatgaacccgttgcgcaagcgtctgcgccgagtctgcagactctaccggaaccactgcctgtacgaccagaggcccgccatcgagttcctcggtcacaaagtgcacgctgcagccatgctcgctgtcgcccgcatcgagtgcgcgctggtgcgtgtgcatgcctttgtatttgggcagcagggaggggtggatgttgagcaggcgcccctcgtagtgccgcacgaaatcggcgctgagaatgcgcatgaagccggcgaggacgacaagtttggggttgaaggcgtcaatcagttcgatcagggcgttgtcgaaggcttcgcgaccttcgaacgccttgtgatcgagtgagcgagtgtcgatacccgcatccctggcgcgttgcaggccgtaggcgtcgctgcggttggaaatcaccgcagcgatgcgcaccgggctgtcgccggtacgcgtgctgtcgatcagtgcctgcaagttactgccggtgccggaaagcagcaccacgacattacaggttgcaggcatcagtgagccttgaggttcttcagttcaacctgggctgcgccttcgggtgcagtggcgatctggccgatgacccaaggttgctcgccggcttcacgcagcacgttcagcgcggtttcaacgtgctcatgagctacgcagatgaccatgcctacgccgcagttcagcacgcggtgcatttcggtttcgttaacgttgcctttttcttgcagccagtcgaagacagccgggcgagtccagctggccacgtcgacaatcgcctgggcgccttttggcaggacgcgcgggatgttgtccaacagaccgccaccggtgatgtgggccatggccttgacggcgccggtgtccttgatcagcttgagcagtggcttgacgtagatgcgggtcggagccatcagcagatcggtcagtggcttgccgtcgagttgggtgttctcgatctcggcgccggacacttcgatgatcttgcggatcagcgaatagccgttggagtgcgggcctgaggatggcagggcgagcagggcgtcgcccgcggctactttggaaccgtcgatgatttcagctttttctacaacgccaacgcagaagccggccaggtcgtagtcttcgccttcgtacatgcctggcatttcagcggtttcgccgccgaccagggagcaacccgacagttcgcagccagcgccgatgccggtgaccacttgtgcagcggtgtccacgttcagcttgccggtggcgtagtagtcgaggaagaacaacggctcggcgccgcagaccaccaggtcgttcacgcacatggccaccaggtcgatgccgatggtgtcgtgcttgttcaggttcagcgccaggcgcagcttggtgcccacgccgtcggtgccggacaccagcacaggctgtttgtagccggccgggatttcgcagagggcgccaaaaccgcccaggccgcccatgacttcagggcgcgcagtgcgcttggcgacgctcttgatgcgttcgaccaatgcttcaccggcgtcgatgtctacaccggcgtccttgtagctcagggagggttgcttgctcatgatccaggcctttaggggggatttctgggtaacgaccgggctggcagggctttcaatgaagaggctcagccgttgacggtctgcgaaggcgcgcgattttatcaggcttgaggggcagcggccatcctcgggccgacgggcagggcgatatggtgttaaaaaaatgccaatcgactctgatttgccgcctattaaggtatagccttggatccgctatcgttatgacagtaggaaaacttaccaagaccctgtgaatgttttaccggccgctgctgtcacagccttgccaagccgagttcacgcggtctgttccagccgctaaatttgtcgttcgggaatcttccatgcgtctgtgtaaattcttttttgtaggctgcttgtcgttggtcagcctggcgagtcatgccgaaaccctcaatggtctttatcaagtacttgaaccagtcagcagccagtcgccccaagagcgcgaccaggcgacccagcgcgcggtgcaaaccctggtgatccgcctgaccggcgacgccaaggccgccgatggcccgggcctggcggcgattcgcaaggatccgcaacaaatcatcagccagtacggttacgacgctggcccgccagaaagcctgcaagtggatttcgacccggtgagcaccgaccgcgcgttgcgtgaagccggcctgtcgatctggggcagcaatcgcccgtcgatcctcggttggtggctgaacgactcgactgaaggcagcagcctgatcggtgatggtcaggccgtcgcccaggctctgcgccgtgcggcccagcatcgtggtttgccgttgcgcttgcctttgggcgacctggatgaacaagtcgtcgccaccgcaccgaatctggaaagtgcggacgccacccccctgcgcgccgcttccgaacgctacggcgccgatgcgttgctcgcggtgcacgcgcgtcaggatggcaaccaatggcaggccaaatggcgcctgtggttgggcgacaagagtgagcaaggtaccgcccagggcgccgacactggcgcggtggctgatgccgtgatgctggcggtcagccagaaactggcgccgcgcttcgcggtcaagccgggcgtcagcactgaacaattgcttgaagtgcagggcatgaccctggagcgctacgccgcgctgggccatctgctggagccgtttggtggccagccgcggctcgtggatggcaatcggattgtgtatcgcgtcaacggcagtgccgatcagttacggactcagttgagcctggccaagttgacggaggtaccggtgggtgaggcacctgcccagcagccagtggtggagggtgcgcagccggctgctgcccctgagcctcaggcgcaactgcgttttcgttggtaagcgttcttccttctatatatagaagcgggaaatagataacagaaggagtggtatatggcggatacgcgtcgttgggtgtggcttggcgggattgtcctgctgtgcgtgtttgtgttcttgctgcattcgatcctgacgccgttcctggtcgcgttgctgctcgcgtatctgttcgatcccgtggtggatcgcctggagaaagtcgggctgtcacgcacctggggcgtggtggcggtgtttgccctgttcaccttgatcgtcaccgcgttggtgttggtgctggttcccatgttggccaagcaattgtttcgcctctatgagttggcgccgcagatgctcgactggctgcagcacacggcaatgccgtgggctcaagccaaactggggctggcggatggcttctggaagtttgacaaggtcaaagcggcaatcagcgaacatatgggccagaccaccgacatcgtcggtgtggtgctcagccaggccacggcatccagcctcgcgctgatcggctggctgaccaacctggtgctgatcccggtggtggcgttctacctgctgcgcgactgggacatcatgatggccaagatccgcagcctgctgccgcgcaacagcgaggagcgcattgtctccctggcggaggagtgtcacgaggtgctcggtgcgttcgtccgcggccagttactggtgatgctggcgcttggaatcatctatgccgcaggcttgatggcgatcggccttgagttggggctgttgatcggtttgattgcaggcctggcggctatcgtgccgtacatgggcttcgtgatcggcatcggcgctgctttggtggcggggctgttccagtttggcggtgacctgtacccgatgctggggattgtcgcggtattcatggttggccaagccctggaaggtatggtgctgacaccgcttttggtcggcgaccggatcggcctgcacccggtggcggtgatctttgcgatcctggccggcggtgagctgttcgggtttaccgggatcctgctcgcgctgccggtggcggcggtgatcatggtgctggtgcgccatgtgcacgatctgtacaaggattcggatgtgtataccggggttgaagaccccgacttgtaactgttgcatcacaaacccggcccaggccgggtttgttgtttctgggggcggggtgtcacactatttgcgcaaatcgcccaagttaacgcaaacctttgattttgcttgtggtctgctgcattgtgcgcccggcgtcacgggtataaactttgcaaactttacacagaggccactaacggttcgtttggagccgttcagtcagcatgaaaccgattcagctgcccttgggtgtgcgtctgcgtgacgacgccaccttcatcaattactacccaggcgccaatgccgctgcactcggctatgtcgagcggctctgcgaagccgacgccgggtggacggaaagcctgatctatctgtggggcaaacacggtgtggggcgtacccacctgttgcaggccgcgtgcctgcgcttcgagcaaatgggcgaaccggcggtttacctgccgctggctgagttgatggaccgtggaatcggcatcttcgaccagctcgaacaatacgaactggtgtgcctggacgaccttcaagcaatcgccggcaaggcggattgggaagaagcgttgtttcatctgttcaaccgcttgcgtgacagcggccggcgcttgctgattgccgcctccacgtcgccgcgtgagctgccgatcaaactggctgacctcaagtcgcgcctgacgctggcgctgatcttccagatgcggcccttgtctgatgaagacaaattacgcgcccttcaactgcgcgcgtcccgtcgcggcctgcacctgaccgacgaggtcgggcattttatcctcacccgtggcactcgcagcatgagcgccttgttcgatctgcttgaacagctcgaccaggcctctctgcaggcacagcgcaagctcaccatccccttcctcaaagaaaccctcggctggtagccagcccagttatttcaaggctttcggcaaattccaggcgccagaaaacctgcgtttgggccggcatagccacgcaaaaggcataaaatgggtgttaagggcttagatgtcatagtccaaacaagaagtcacatagatcacgattgaatttgcaaatcgatgtgatagtgggcatagtctcgacttctttacatatcagccacggtcgtgcccatgctaaatcgcttcgcacccctcgtgccactcgcactcgtaaccctgttgtttggttgcgcctcccaccctcaacaggtggtcgagcagcaaaaaagccaacaacagtcccaggcaaaattcgttgcatcgcaatcttccactgtttatcaggaagagatcgcaactgaaaaagaactggccgacttcgccagtaacaagccttaccagctcccggttttggccgacagcattcttgagcgcggcatgtccctgatcggtacccgttaccgtttcggtggtacctctgaagccggtttcgactgcagcggcttcatcggctacctgtttcgtgaagaagccggcatgaatttgccgcgctcgacccgcgaaatgatcaacgtggatgcaccgttggtcgcacgcaacaacctcaagcccggcgatctgcttttctttagtacggctggccgtggtcgtgtcagccacgccggtatctacttgggcgataaccagtttattcactccagcagccgtcgcagtggcggtgttcgagtcgacaacctgggcgacagctactggagcaagaccttcatcgaagccaagcgcgcactcgccatggccccgactacggttaccgccagcaagtaaagttaaagtgatacttgaagtttgacgtgtaagcgctagaatccctggatattgttggaatccgttcgcgcgagctttgcttgcgcgttctggttttcagcgttcggcagcgaaagccgcatccagaccaggattgttctgcacatgtcgacctcggcccgccttattcttctcgtttgcgccgcgcttctcagcgcctgcgcaagccgtccaccgccgccggctcccgtagccgtgaagcccaagccggtgttcaactattccacccaaagtttctcgcctgctgccgaagacgtgctctttcgcgcgctggggctggttggcacgccttaccgatggggcggcaacacgccggactccgggtttgattgcagcggcctgatcggctttgtgtttcgcgatgccgccggaatctccctgccacgtaccacccgtgagctgatcgtgatgcgcgcgcaggatgtcagtgagcagaacctgcagacaggtgacttgctgttcttcgccaccggtggcggttcacaggtgagccacgccgggatctacgtcggcgaaggccgctttgtgcatgcgccgcaaaccggcggtaccgtgaagctggacaccttgtccaaagcctattggcagaatgcctacctgagtgccaagcgtgtgttgccggcaaacctggcgcgcaatccttaaaaaggcacgccgaaatcagtgtgggaactgcttgtgtgggagctggcttgcctgcgatggcatcgctgcagtgcaactgatgcaccgaggtggctgcatcgcaggcaagccagctcccacacaagccagctcccacattgggtttgtggtggtcttgagggcggttatttagctgccgacacccgccacaccttgttccccacatcatcggccaccagcaaatccccctgctgatcgatcaccacgcctaccggccggcccatggctttctcgtccttgtcgaggaacccggtcagcacatccaccggctgccctttaggctggccgccctcaaacggcacgaagatcaccttgtagccactgtgcggtttgcggttccacgagccatgctggccgataaacgcgccatggctgaactgcgccgggagtgtgttgccctcggcgaaggtcaggcccagcgaggcggtgtgcgggcccacggcatagtccggtgcgatcgccttggcgaccagatcgaggttctgcggtgagacgcgcacatccacatgctgtccgtaataactgaacggccagccataaaacgcaccatccttgaccgaggtaatgtagtccggcaccaggtcgctgccgatctcgtcgcgctcattcaccgctgtccacagtttgccgctttgcggctcccacgccataccgttggggttgcgcaggcctgaagcaaaaatacggtgctggcccgtagcgcggtccacttcccaaatcgccgcccgaccttcttccgccgccaggccattttcgccaacgttgctgttggagccgacactcacatacagcttgctaccgtccttgctggccaccacattcttggtccagtggtggttgatgctgccgcccggcaggtcgacgaccgtggtccccgctgccttgattgcggtttcgccgggcgtataggggaagcgcagcagcttgtccgagtcggccacgtacagatcattgccgaccagggtcatgccgaagggcgagttcaggttttgcaggaataccgtgcgcgtctcggcgacgccatcgtggtcggcatcgcgcagcagcgtgatgcggttcgggctcggcacgcccgccccggcgcggcccatgactttctccatcacccagccgcgaatgcccttggcgtcatccggtttgggcggcgcgttggtttcggccaccagcacatcgccattgggtagcacatatagccagcgcgggtggtccagtccttcggcgaatgcggccacctgagtgcccgccgccggtgtcggcttcgcgccgtccggccagccgatcgccggtgcgatgtttacggtggggatcaaggttttgttcggttccggcagcttgggcgaaggcccggtgccgtcggacacctgcagggtagagctttctccgcaggcggcgagggtgcctgcgaccatgatcagtaaggcaagtcttgttttatgcatggttttctcctgaatacctgtaagggtagaggagtacggccatgcgatggttcaagtgcaaggccagctttaattgacgctccacccccaacccactaaccttcgcggcttgttccaggtgctccgtggcccgagggtcgacagagtgaaacagggaagccggtgagtgagcgcacttgtacacagtgcagccgcaattccggcgctgcccccgcaacggtaaatgagtgaaaacggtgctttttgccactgtatcgcgcgcgatatgggaaggcgcatcgtcggtcgccttcgcgcaggagcgcgccactcatgagtccggagaccggcctgggtcatccaacagcatcacggtgggcgatgcttggctgtctgttttgtctttttcctgcccgccgtttttttgtccagccccaacggagcgctgccatgactgattcccccgaccgcgacgaacgccacctggcgcgcatgctgcgtaaaaaagccgtgatcgacgagcgcatcgccaattcccccaacgagtgcggattgctgctggtgctgacgggcaacggcaaaggcaagagcagctcggcgtttggcatgctcgcccgtgccatggggcacggcatgcagtgcggcgtggtgcaattcatcaaggggcgcaacagcacgggcgaagagctgtttttccgccgcttccccgaacaggtacgttttcacgtgatgggcgaaggcttcacctgggaaacccaggaccgccagcgcgacatcgccgctgccgaagccgcctgggcggtttcccgcgaactgctgcaagacccggcaatcggcctggtcgtgctggatgaattgaacatcgccctcaagcacggctatctcgacctcgatcaggtactgagcgacctgcaagcccgcccgccgatgcagcacgtggtggtcaccggccgtggcgccaagcccgagctgatcgaaatgggcgacaccgtcaccgaaatgggcatgctcaagcacgcgttccaggccggtatcaaggcacagaagggcgtcgaactttgaatcagccccgtcattgcccggccgtactgatcgccgcaccggcgtccggccagggcaaaaccaccgtcaccgccgcgctcgcccgtttgcaccgcaacctggggcgcaaggtgcgtgtgttcaaatgcgggccggattttctcgacccgatgatccacgagcgcgccagcggagcgccagtgtatcaattggacatgtggatggtgggcgagcaggaaagtcgtcgcctgctgtgggaagcggcgggcgaggcggacctgattctgatcgaaggcgtgatgggactgttcgacggcaccccgtccagcgcagacctcgcgcggcatttcggcgtgccggtgctgggtgtcattgacggcacagccatggctcagacattcggcgcgctggccttgggccttgcgcgctatcagccggacctgccatttgccggtgtgctggccaaccgcgtcggcaccctgcgtcatgcgcaactgttggaaggcagcctcaccgaaggcctgcgctggtacggcgcgctgtcccgtgaaaccggcatcgaactgcccagccgccatctcggcctggtgcaagccagtgaactgaatgacctcgatgcgcgtctggacgccgccgcccaagccttgggcagcagttgtgaagtcgccttgccgccgccggtgacgtttgccgcgccaaacgtgatcgaggctgaacccttgctcaaaggcgtgcgcatcgcggtggcacgcgacgaagccttcgccttcacctatggcgccagcctcgaccttttaagggcgatgggcgccgagttgcatttcttctcgcccatccatgaccgcgaattgcctgacgccgacagcctgtatttgcccggtggttatccggaactgcaccacaaggcgctgtcgcacaacacgccgatgcttgacgccatccgcgcccaccacgcggccggtaaacctctgctcgccgaatgtggcggcatgctctatctgctggactcgctcaccgatgtcgacggcacccgtgccgagctggtggggttgctgcagggtgatgccgtgatgcagaaaaaactcgctgccctggccctgcaaagtgtcgagctgccggaaggcgtgctgcgtggccacacctatcatcattccctgaccagcaccgagtggcagccgattgcccgtggcctgagccccaatggcgggcgcggcgccgaggcggtttaccggcaagggcggatgaccgcgtcctacgtgcacttttattttccgtcgaatccggcggcggtggctgcattgttcgcgcccgaccgggaggccgccatcgcaggcaagccagctcctacactggagggtgtttcaactcggtcaactgtgggagcgggcttgcccgcgatagggtcatgaccgacaacgccttccccgaggctgaccgccaggccgtctaccgcgccatcgccgaacgccgcgacatgcgtcatttcaccggcggcaccgtcgcctccgaactgctgcaccgtttgctccatgccgcgcaccaggcacccagtgtcggcttgatgcagccgtggcgttttatccgcatcagcgaccggccactgcgtgggcaaattcaacagttggtggaagaagaacgcatccgcaccgccgaggccctgggcgagcgttccgacgaattcatgaagctcaaggtcgaaggcatccacgattgcgccgaagtgctggtggcggcgctgatggatgaccgcgagcgccacatttttggccggcgcaccttgccggaaatggacatggcgtcgttgtcctgcgcgatccagaatctgtggctggcggcgcgggtcgaaggtctcggcatgggctgggtatcgctgttcgagccccaggcgctggccgacctgctgggcctgccgcccggtgcaaaacccttggcagtgttgtgcctgggcccggtagccgagttctacccggcaccgatgttgcagcttgaaggctggaccgaacctcggccgctgagtgacatgttgtatgagaatgcgtggggagtgagtcaatgagtgtggccttgctgtgtgtcgcggcagtggcgctggatgcgctgctgggcgagcccaagcgctggcatccgctggtggcgttcggcaatttcgccgggcgcatcgagcaacgtttcaacaccggtggccatggctggcgcagccatggcgtcaccgcgtggttcatcgccgtggtgccgctgaccctgttggccacggctttgtcgtgggcgccctatatcggctgggtgctggagattctggcgttgtactgtgccctgggcatgcgcagcctcggtgaacatgtgatgccagtggcccaggccctgcgcggtgatgacctggaggaggcgcgcaagcgcgtcagctacctcgtgagccgtcagaccagcgaactggacagtaccgaagtcgcccgcgccgccactgaatcggtgctggagaacggcagcgatgcagtgtttgccgcgctgttctggtttgtcgttgccggcgtgccgggcgtggtgctctatcgcctgagcaacaccctcgatgccatgtggggctatcgcaacgagcgctttgagcgtttcggctgggcggcggcgaagatcgacgatgtactgaactatattcctgcacgcctggtggcgttgacttacgccgtgctgggcaaaacccggctggcactcaaatgctggcgcacccaggggccgacgtgggacagcccgaatgccgggcctgtgatggcagccggtgccggcgcgctgggtgtggaactgggcggcgcagcgatttatcacggcgagctgcatcagcgcccacccttgggcgaaggcccggcggcggatgccgattccatcgaccgaggctggcaactggtgcagcgcggcgtatggttgtggctgctgatcctgtgtgcgggggcgcaattttatgcttgaacacggtggccggctgcgcaaggcagcgatgcagtacgggattgccgaggctgactggctcgatttgtccagtggcctggcgccctggccgtggccgatccccgagatcccgttgcgcgcctgggcacgcttgccggaaaccgatgacggcctggaaaaggccgccagcgagtattacggcgctgctcacgtgttgccggtgccgggctcccaggcggccattcagttgctgccgcgcctgcgccgcaccggcaaggtcggcgtgctgtcgccgtgttatgccgagcacgccgaagcctggcgccgcgccgggtacgtggtgcgtgaagtacaggaacaggaagtcgactttttcctcgacggcctcgacgtgctggtggtggtcaaccccaacaaccccacggggctgagcctggccccgcaacgcctgctcgactggcactcacgcctggcagagcgcggcggctggctggtggtggacgaagcgttcatggacgttaccccgcaactgagcctggcaggccaggcccatcaagtggggttgattgtgctgcgctcgttcggcaagttcttcggtttggcgggtgtacgcctgggcttcgtactggcggagcgcaagttgctcaagctgctggccgagcaggtcggaccgtgggcggtcagcgggccgacgcgggtgctcggccaggtatgcctgcgcgataccgccgggcatgcacatcagcgtgtgcgttgcattgagtccggccagcgcctgtttaacctgcttgagcgccacggctttcaacctcacggcggctgcgccctgttccagtggttgatcacgccccatgccgagcgcttgcacgaattcatggcccagcgcggtattctgctgcgcctgtttgcccatgacagcagcctgcggttcggtttgcccgacagcgaggcggattggctgcggctcgacgcggcactggccgcctacaaggaggccgcatgagtacgctgatggtacaaggcaccacctccgacgccggcaaaagcacactggtgaccgcgctgtgccgctggctggtgcgccagggcgtggccgtcgtgccgttcaaaccccaaaacatggcgctcaacagcgcggtgaccgctgaaggcggcgaaatcggccgtgcccaggccgtgcaggcccaggcggccaacctggcgccgcacaccgacatgaacccggtgttgctcaagcccaacagcgataccggctcccaagtgatcattcacggccgcgcggtcaccagcatgaacgcggtggcgtatcacgactacaaagccatcgcgatgcaagcggtgctggcttcccacgcgcggttgagccaagcctacccggtggtgatggtggaaggtgccggctccccggcggagatcaacctgcgcgccaatgacatcgccaatatgggtttcgccgaagcggtggattgcccggtgctgttgatcgccgacatcaaccgtggcggggttttcgcccacttggtcggcacgcttgaattgctgtcgcccagcgagcaggcgcggatcaagggctttatcatcaaccgttttcgcggcgacatcgcgctgttgcaaccggggctggactggctgcaagcccgcaccggcaaaccggtggtgggtgtgttgccgtacgtcatggacctgcacctcgaagccgaagacggtatcgaccggcgccagatcgacaaggccgcggacgtgctcaaggtggtggtgccggtgttgccgcgtatcagcaaccacacggattttgatccgctgcgcctgcacccccaggtggatttgcagtttgtcgggccgggccaggcgattcctgcagcggacctgattattttgccgggctcgaaaagtgtacgcagtgatttggcgtatttgcgcaccaatggctgggaaacggccgtggcgcggcatttgcgctatggcggcaaggtgctgggtatttgcgggggcttgcagatgctcggcgagcaagtgcatgacccacttgggctggaaggtccggccgggtccagcgaaggtctggggttgttggcattcagcacggtgcttgaagaagagaagcaactgcgcaatgtgcgcgggcgcttgctgctggaggacgccgaggtcagtggctacgagattcacgccggggtgacgacgggcgatgctctgttgcacgccgccgtgcggctggacgatggccgtagcgatggcgcccagagtgccgacgggcagattctcggcacctaccttcacggcctgttcgaaaccccggccgcctgcagcgcgttgttgcgctggtcgggcttgcaggaggtgcaggaagtggattaccacgccctgcgcgagcgcgatatcgagcggttggcggacctggtggaaaaccacctggataccgacctgctacgcaagctatgcgggatttgagcatgtatacgcggttcttatgtgggagctggcttgcctgcgatggcggcctggcggccaacccaattcagccaaccccaggtgccatcccatgctccaactgatcctcggcggtgctcgctccggcaaaagccgcctggctgaaaagctcgccagcgacagtggtttgccggtcatctacatcgccaccagccaaccgctggatggggaaatgaacgcgcgcgtggctctgcatcgccagcgtcgcccagacgcttgggggttgatcgaagaaccggtcgaactggcccgcgtgttgcgtgaaaacgctgcggccaatcgctgtctgctggtggattgcctgaccctctggctcaccaatctgctgatgcttgaagacgccgaacgcttggcgcttgagcgcgatcaactgttggaaaccctggcttccctgccaggagacatcatttttgtcagcaacgagaccggtctgggtgtcgtgccgctgggcgaattgactcgccgctatgtggatgaagccggttggctgcatcaagccttggccgagcggtgtcagcgtgttgtcctgacggttgccggcctgcccctgacattgaaaggtaccccgttatgactgactcctggtggctcaacccgtgcaaggccgtcgacgcctcggcccatgaacaagcgctggcacgccagcagcaactgaccaaacccgccggctccctgggccagttggaggcggtggccgtgcaattggctggcctgcagggccaggtaaaacctgcggtggatgagctgtggatcgccatttttgccggtgaccatggtgtggtcgccgaaggtgtgtcggcatttccccaggaagtgacggggcaaatgctgcacaactttgtcaccggcggcgcggccatcagcgtgttggcgcggcagttgggggcgcaactggaagtggtcgacctcggcacggtaacgccgtcgctgaatctgcccggtgtgcgccatctgaatatcggtgcgggcacggccaattttgttaacgggccggcgatgacggcggctcaggggcgattggcgctgcaagcgggccgagacagcgtgcttcgcgcgcgtgaagccggtgcacagttgtttatcggcggcgagatgggcatcggcaacaccacggcggcgagtgcgttggcgtgtgccttgctcgcttgcgcggtgagtgacctgacaggccccggcaccggtttgaatgcccagggcgtcagccacaaagtcgcggtcattgagcgcgcgctggcgctgcatgccgggcagcgtggcgacgtgctgcaaaccctgttcaacctcggtggttttgaggtcgctgcgttggtcggcgcctacctcgcctgtgcccaggaaggcatcgtcgtgctggtggatggttttatctgcacggtcgccgcgctggtggctgcgcgcctgagcccggcgtgccgcgaatggctgctgtttggccaccggggcgccgagccgggccatcgccatgtgttgcaaagcctcgacgcccagccgttgctggaactcggcttgcgtttgggcgaaggcagcggcgcggcgctggcggtgcctatgttgcgcctggcgtgtgcgctgcacggccagatggcgaccttcgccgaggcggccgtggcagatcgcccggcatgactttgcgcctggacctgctgcgccacggcgaaaccgaactgggtggcggcctgcgtggcagcctggatgatgcgctgacgcccaagggttgggagcagatgcgcgctgccgtcgtggggcaggggccttgggaccgtgtggtcagctcgccgttgcaacgttgtgcactgttcgcccgcgagctgggcgcgcggctcaatctgccggtgagtctggaaaaagatctgcaggaattgcacttcggtgcgtgggaagggtgcagcgcagcggcgttgatggagaccgacgccgaggcgctggggctgttctgggctgacccctatagcttcacgccgcctgagggggagccagtcagcgatttttctagccgtgttctgggcgcggtctcacgcctgcatcaggcgtatgccggtgagcgcgtgttgctgatcagccacggtggtgtaatgaagctgctgctggcgcgggcccggggcttgcctcgggagcaattgctgaatatcgaagtcggccacggtggcttgttcagcctgcgggtcgaggtggatggcgtattgaaggaaggacgctgagcatgctgccgttttggatcgccctgcaatttctcagcagcttgcccatcaaattgccgggcatgccggagccacagcagttggggcgctcattgctgttttatccgctggtaggcctgctgtttggcgtgttgctgtggggcctgaacactgcgctgacgggcgctccgctgttgctgcacgctgcattgttgctgaccgcctgggtgttgctcagcggcggtttacatctggacggcctggctgacagcgccgatgcctggctcggtggctttggcgaccgtgagcgcacgctgacgatcatgaaagacccgcgcagcggcccgattgccgtggtcaccctgggcctggtgctgttgctcaaattcaccgcgctggtggcgctgatcgagcagcacaatggcgtggcgctgattctcgccccgctgatcgggcgcgcttcgatgctggcgctgttcctcaccacgcgctatgtgcgtgcggggggattgggccaggcattgtcagatcatttaccaagggttgtcgggcagcaggtgctgatcctcagcggcctggcctgcgtgctgatcggtggcttcaacggcggtattgctgtgctgctggcggctattggctttctgtggctgcgccaattgatggtcagtcggctggggggcaccaccggcgataccgccggcgccctgttggagctgctggagatggccgtactggtcggtctggcgctgtaacgctttcttgcaattccttaatcccgggtatatacacgctcaatgcttgcctcccaatgcttatgcaccaacctgcgacgcgccgcccgtggcgtcagcaggcattacgacggcgctctcgacggcttcgggatcaacgttgcccagtattctttgctgtgtaacctgcagcgtctcgaccagccgagcatttccagcctggctgaagccatgggcctggaccgcagcaccctggggcgtaacctgcgggtgttggagggcgaaggcttggtgcagttggtggaaggcgatgacctgcgtaaccgcctggtgctgttgacccaagccggtgaagaaaggctggctgcggccttgccggcgtgggaagcggcacaacagaaattgatcgatcaactgggcgcggaaaaacgcgaaaccctgttggccttgctggacgagctcgcctgaacgcgagtttgttcgaatacaagcgggtatatacccgcgagcggagaacaagaaatgacttcgatgtggcgcaccagtggatgggtactgttggggagtgcgctgatactggcgttgtcgttgggcgtgcgccacggctttggcctgtttctggcgccgatgagcagcgaattcggctggggccgtgagacctttgcctttgccatcgcgttgcagaacctgatttggggcttgtcgcaaccgtttaccggggccctggccgaccgctttggtgcgaccaaagccgtgttcgtcggtggtgtgttgtacgccgtcggcctggtgttgatgggcatgtcggattcggcgtggtcgctgtcgctgagcgcgggcttgctgattggtatcggcctgtcgggcacttcgttctcggtgattctcggtgtggttggccgtgctgtggcaccggaaaaacgcagcatggcgatgggcgtcgccagtgccgcaggttccttcggtcaattcgccatggtgcccggtaccctgggtttgattggctggctgggctggtcggcagccttgctggcattggggctgatggtggcgctgatcctgccgttggtggcgatgctcaaggacaaaccgctgccggccatggccggccagcaaaccctgggcgaagcgttgaaggaggcgtgttcccactcggggttctggctgctggccttcggctttttcgtgtgcggtttccaggtggtgtttatcggcgtgcatttaccggcgtacctggtggaccagcatctgccggcaagggtgggcaccaccgtcttggccttgatcggcctgtttaatgtgttcggcacctacacggcgggctggctcggcgggcgtatgtcgaagccgcgcttgctcacggggttgtacgtattgcgtgcggtggtgatcgcgctgttcctgtgggcgccggtgacggaggttacggcttacctgttcggcatggcgatgggcttcttgtggctgtccacggtgccgctgaccaacggtacggtcgcgacgttatttggtgtgcgaaacctctcgatgctcggtgggattgtgttcctgtttcaccaactcggttcgttcctgggcggctggctgggcggggtggtctatgatcgaaccggtaactacgatttgatctggcaggtagcaatcctgttgagcttgctcgccgccgccctgaattggccggtacgcgagcggccggtggcgcgtttgcaggcgcagatggaggcggcatgactgtggcagtgcggtgtttgacgattgcggcgtttgtcgtgctgctgctgttggcctggtggggctggcagcgcggcgggttggcgttgatgcaactgggtatgtcgatctgttaagttcggggtctggaatcgttcaaggacttcacgacatgcagatgcgctggcttgcagtacccgtcctgatggccattggcagtgttgccaaggccgccaattgtccgccgttgctcgagggccagttgcccaagttgcgggccaaggaaaccatcgacctgtgccagcgcttcgccggcaaaccgttggtgatcgtcaataccgccagcttctgcgggttcgcgccgcagttcaaaggcctcgaaaccttgtatcagcgttacaaggggcaagggttggaagtgattggcgtgccgtccgatgacttcaagcaggaaaccaagactggcgaagagacggctaaggtgtgctacgtcaattatggcgtgaccttcaccatgaccgagccgcagaaggtcaaggggccggacgcggtgcatttgttcaaagtgctggcgcagcagaccagcgcaccgaagtggaatttctacaagtacgtggtggaccgtcagggcaaggtgatcgccaatttctccagcctgaccaagccggacagtccggatctgatcaaggctgtcgagcaggcgctgacttcgaaaccctgattatccgccattgaaaagccccgcttcctttgcaggagagcggggctttttgtattcaactggcgagccgttcaggctcgcagtgaatcagaacttgtaggtagcacccagtgcgtaaccccaagcgctgtttttgtactcggcgttgtaaggcgtgcctttaccggtacggttgacgttgacttcttcttcccacaggtaggacaaggcagcatcaatggtcaggtcgtcggttgcattgaagccggcaccgaaactcacgatcttgcgatcgcctgttgggatacgaaccgagcggtcagtattgttggttggcgattggtcaacggtaaagccggtgcgcagcacccattgcttgttgacctggaacgatgcgccgatggccgaagcccaggtgtcgtgccagttctgcggctcgttaatcgtgccgatcgggccggccgaaccacccagttgggcaggaacgccttcgttgttgacggtgatttctttcaggcggctccagcgcgtccaggtgctgcctgcatagacagtccactggtcatccagcttttgggtgatcgagaaatccacggattccggggtggtgatatccagcgatgcaccaaagcggccgccgttgaacggaccgaaaccgatgccggaaatgttggtgtggccttccagcttgtatttgaccttggaggtgtaggtgataccgatgttggttttatcggtaggggtcaccagtacgccgattttgtagccccaagcggtgtcatcacccttgatgtctaccttgccatcattgcggccgaaggtggctgccaatggagtggcggaggtcaggttaccgttgatacggttgaaggttgggccgaagccaacggaaacgtattcgttgaacgcgtagctgacggtcggctggaaagtgacgacttttacttcacttttcttgccgtagtaacgaccgccgaagccgctttcgtaatctgtaatcaagccgaatggcgcgtagacgcccaggccgaaggcgaggttgtcgtcgaatttcttcacggcaaacagcattggaacggcggtgaagggaaccatatcgccgtcgttggtgccgcgaggggcgccgccgctgacattcttgatatcggtcttggcgtcgattgccgcaacacccgcggtgatttgatcgcgcttgaggcgcgacatgccggcagggttgcccgcgatagtacttgcatcatcggcagcagaagaacgacctgcgaaacccgtacccatcccgctgacgctctgttcgttaagggcaaaaccgcttgcgaacagttgggaggatgccatggcaacggcgaggctaagtgtggtcttgagcattacttttttcattattagaaactccttggtgatcaccgctgcggaaagtaacaataaatttaagttagcgctataggctgtaatgctggagatagagcggttttgtaggacaatcagaccagattcaatgttttttgccgaatcttgcaaaacgcctgatcaacaagtgacctgatccatggttgaaacacaggttttccaggcctgggtaaaatcccgcagccttccttgtgggtgaaatatttctttccagatacgcgccatggccaccacatcgccgggcggcggcagggcggggcggtgttgttccaccagcaaccacgcaatggccgtggcgtagcgcaggttgaccgtgagttcgagctgaggcgcgctgagaaatgcatgctggctggccagcccgcgcaccaggctggcgcgctcggggtccagcgccaggtaattgtcccagagggcgcggtggcggggttcggtgatgctgtacaggccgtggccgcgccgatcatgcagagccgaccccaattccgactggctggcggcaatgcccagcagcagggattcagcagtctggtcatggcagccgaggtacagcaatgtcggcctgatcacataacgacacaattcgctggcggcgatacccatacaagcctcgatccatgaaagtggtcgacggtgcctgagagggggcttggcagctgtgaatcggatctcaggcccgtcgcaagcggatcacgccgcttgagttgaagtgtagtgtcatatttgtgatgtaaaggactgtttttaaaacatcttcttcatttagttataacgtttatatctatttgaacttagcactcaggttcaaagctcgaatgtcaggcaataaaaaaccctgtgttttaaacagggttttttgtgtttcagccgctcgggtcgatcaggcagtcagtgcctggcgggtacgctcgatcacggcctgcagcggctctgcgctggagtattgatcggggtacaggcgttcgctgtgacgagcgatgccgtgttcgttgaccagagtgaagctgaagcagcctttgcgagcggccatgatcaggcagttcattggtgcaaaagcgttggtgagggtgcgaatggcatcctgagtatggatttgagtggacatattattggtgttcctacaaatgacacggataagaaccgtgcaacgttaaaacgttccagtaacgctgatcaccattgatcaaacgaagaacccgactggaacaaagcagccagtttgaagcgctgataagttaggcgcgcttgggctggcaggtaggtacttaggagggcaggcaacacaacaggggcaaaggttctgggcccggggtgaagatcctgatcaatttgcaggttggttcggtcagagtattgaaacttcgcggcaccctttgcttgttcaaaggcagtgtcgtcgcaagtgatacctggaaaccatcgaggtggtcgatcccgtgttgttcaggggacttgttcgaccagaattgactttcagcttggtactaacgccgcggatagtaacggattgaaacaaggaaaggaagtgtgctagccaaaaaacttcaatcagctgcccaacagcccgcgatagaccagcaccgtgaccgaggctgccagcgagcagcccagcccgtaggccgcaagggtcaggcgccaggagcggccggcttcgataacctgcatcacatcgcgcatgtcgttgatcctgccttcccccaactcgatgcacaggcttactgccgtgaaagctgccgacaacagaatggcgatggcaaacagcgcaccatcaggggagggcagcgctgcattgataccgagcgacgtcgcgcagatggccaacaacaacagcgcaaataacagaattcctttcatcgtcgcctacgggttggttgcgtcacgcatgcagtttggtggagcagtgtggcgagccaggactgatttgaaaaggcccgcggtgtttgccctgcggtaacattttttcgtcgtattgaagcaaaacgtgtcggtgatataaccggtggatgggtacttgtgcacattagttgcgaggtgtgtaaccacgctgtcaactgccatgaagcgccggcatttgcctgcaatgaaaatttaagtcaatgaaaaatatcgcttttttttattggtgaaaaaatcgtcagtttgactgcggcccccgttccatggggctttgcgcgagttaaaggggggttgtccactgacttatccacagcttctgtggattgtcccaagcgcttgctctagaacgggcgtgcagggttttttcagctttacctgtacgaaaaaaagagtagagtggcgcgccttccgttctgtcccacagtgctttatgaagtttcgctcagtatcaccttctgttaccgatacccctcaaactgttaccgcacccaagcgcttttccttgaaagtcgccttgtggctgctcgacagcccacgcctgggccataacaccaacgttaagcactttgcagggcgtttgctcaagcaaccggctcgtgagggcgtggtcgctgcgcaaagccgtttgggtcagttgatgtgccgtgaatgcggcaacgcccgagaccgccgtatcggtcacgacctgctgcgctctgctgcccgtgccggcgaccgctgtgcccaacgggaattgggtcaggtcgaagactgagctgtcgtctagccttgtgctccgttaacctctccctttttcggtgatggcagaaatggctatggcttttgactggaccagtattgccctgggccttgctggtgctgcagtgccattgttggcgctgtgttggcagatccaacggcggctgagcgcgcgcatgacggggtgggagttgcttgaagaacgcctggccaccgcgcaactggcccaggaagggctagccgcccaactcgacgccagccgcgacgaaatcagcgacctgagtcacgccaacgcggccaaacaggctgacctggccgccatgcgccgtgaagtcgaactgctgcaggtcgaccgcgataacgcccgcgatgcagcccatgcctggaacctcgaccgcagcgccaaggaaactgaactgcgccgcctggatgcgctgtctgccgcgctgcgcgccgaactgcgtgaacaacaggaaagccatcagcaacgtctcactgacctacaaggttcgcgtgacgagctgcgtgcacagttcgccgaattggcaggcaagatcttcgatgagcgcgagcagcgctttgccgaaaccagtcaggagcggctcgggcagttgctggacccattgaaagagcggattcagtcgtttgaaaagcgtgtcgaagagagttaccagaacgaagcgcgtgagcgcttttccctgggcaaagagctcgaacgcctgcagcaactgaacctgcgcctgtcggacgaggctaccaacctgacccgcgctctgaagggccaaaaaccccagggcaattggggtgagttgatccttgagcgagtgctggagcatgccgggctggaaaaggggcgcgagtatcagacgcaagtgagcctgaagggcccggacggcgaacgcttccagccggacgtgttgatcatgttgccgggcgacaagcaggtagtggtcgactccaaggtcagccttaccgcctatcaacagtatgtcggggccgatgatgacgtgatcggccaagcggcgttgaagcagcacgtagtgtccttgcgcaatcacgtcaaaggcttggccggcaaggattacaagcgcctggaggggctgcacagcctggatttcgtgctgctgttcgtgccgatcgaggcggcgttttccgccgcgttgcaggccgagccgaacctctttcaggaagcgttcgatcgccatattgtcatcgtcagcccgacgaccttgctggccaccctgcgagtgatcgacagcctgtggaagcaggagcgccagagccagaatgcccgcgagattgccgagcgtgccggttggctgtacgacaagtttgtgctgtttatccaggacctggatgaggtgggcaatcggctgcaacagttggataaagcctacagcgcggcgcgaaacaagctgacggacgggcgcggaaacctggtcagtcgtaccgagcaattgcgcttgctgggcgctcgcgcgagtaagagcctgccggctgatttgctggagaaggcgatgaccgattcagatggcgtggcgcatttgcccgagtaggctgtggtcccggtggtaggcttgtgtgggagctggcttgcctgcgatggcatcaccgcggtgtcactgaaagaccgaggtgcctgcatcgcaggcaagccagctcccacataaaccagctcccacataaaccagctcccacataaaccagctcccacacaagccagcttgcaaaggtctcgaccaagtcttcctatagtggcaaatgccggctcaacaacgctcgcagtgctgccggtttcaccggcttggccaggtaatccagccccgccgcatgcacctcggcgaccatctccgggcgcccgtcggcgctgatcaccacgccgggtattggctctgccaattgtgcgcgtaaccagcccatcagctcggtgccggtttcaccgtggtccaggtggtaatccaccagcgcgagttgcgggcgcacgccgtcggccagcagcgccgcgcattgcgcctggtcggtggcggtccacacgtcgcagccccagcgcgtgagcaggctgcgcatgccgatcaggatgctctcttcattatccacgcacagtacctgcgcaccacttagcgccaggcccttgtcctgcggggctttggcttgcgggctggcctggttgcgcgccagcgggacacgcacgctgaacacgctgcccttgcccggccacgagcgcacgctcaaacggtggcccaacacgcgacacaggccgtcggcaatcgcgaggcccaggcccaggcctttttccgcgcgggtctgatgactgtccaggcgtttgaattcttcgaagatcaccttctgtttatccagcggaatgcccgggccacggtcccagacttccaggcacagttcgttcttgcgcctgcgcacgccgagcagcaccggaccgtccgcatagcgaaaggcgttggtcagaaagttctgcaaaatccgtcggagcagtttgatgtcactgtccacccttaaacgactaccgcgcaggcgaaagcgcaggccttgctcttgcgcctgcgctttgaactcggcgccgagggtgtcgaacagttcgttgaggacaaacggctggcgctgcgggttgatcttgccgttctccaggcgcgagatatccagcaagtcgctgatcaagtcttcagcggaacgcagcgaactgtcgaggtgctgcaccaactggcgggcctcgcctgacaagccgtcgttctggtgggagagggcggcggaaaacagtcgtgcggcgttcagtggctgcatcaagtcgtggctgacggccgccagaaaacgcgtcttcgattggctggccgtttcggccacacccttggcatccgtcagcgccacattcagttgcgacagttcgtgggtgcgctcggccacccgttgctccagcccttcgttcgcctccgtcagtgcttgctcggcctcacggaacgcggtgatgtcggtaaaactcatgacaaaaccgccaccgggcatcgggttgccgatcagctcgatcacgcggccattgggaaacaagcgctcggaggtatgcgcgcggccctggcgcatccagtgcaggcgtcgcgcgacatgcacttcggcttcgcccgggccgcacaggccccgctcggcgttgtagcgaatgatgtcggcgatgggacggcccacgctgatcaaaccgtcggggtagttgaacaattccaggtagcgccggttccacgccaccagcttcagcgactgatcgaccacgctgatgccctgggtgatgttttcgatagccccttgcagcaatgcccggttgaactgcagcacttcggaggcttcgtcggcaatccgtacgacgtcttccaattgcatttcccgaccttcaatcgcagcttttactacagcacgcgtcgaagaggcgccgagcacaccggccagcaagcgttcggtgtgagcgatccagtcgttgtcggcattctggttggggttgaagcctttgccttggcgataggcgaagcgaataaagctctgctgggcgcgttcctcaccgacaaagcgcgccgccaggctgagcaggtcgctgatttgcaccgacagcatcgaacgggcgctggcacgctggctgatttcctggccgatgaatcgcccggcttgccagtgttcggagacccgtgtgcgcgacaacatcgagacccacacgaacagtgtgaagttgcccgccagcgagaacacggtgcccaacgtcaacgaggtcacggacaggccaaacgggtgggaatgcatccaggtgaggccggggaagaggctgagcgaccagcccaggcttttcgccgtgacaggcaggaccagggtgtagaaccacaggaatgtacccgccgccaacccggcaaacacgccgcgccggttggcttgtttccagtacagcgcgccgagcatggccggggccagttgggtcacggccgcaaaggcaatctggccgatggtcgccaggctcgcgctcgagccgagcaatcggtaactcacgtaggccagcagcaggatgatcacaatgctgacgcggcgcaccgacagcatccagtggcggaacacttcgaacggccgctcggcgctggagcggcgcagcagccagggcagcaacatgtcgttggagaccatggtcgacaaggcgatgctggccacgatcaccatgccggtcgccgccgatgcaccgccgataaacgccagtacggcgagggcgggatgggcttcggccatgggcaggctgatgacgtaggagtctggcagcaccgagctgggcagcatcatcttgccgcccagggcaatggggatcacgaacagcgcagcgaggatcaagtacgccgggaacacccacttggccaggcgtaaatcctgcgggtcgatattttccaccacggtgacatggaactgcctgggcaagcagatgattgccatcatcgccacgccggtttgcaccaccatcgatggccagttgatcgtctcttgccagtactcctccaggcgcggcgcgagcatcgcctggctgaacaggtcgccgaaaccgtcgtacaggccgtaggtcacaaacgcgccgacggcgagaaaagcgaacagcttgaccagggattcaaatgcgattgccagcaccatgccacggtggtgctcggtggcgtcgaggttgcgtgtgccgaacacaatcgtgaacagcgccagcaccagcgatacgatcaaggcggtgtcctgcgcgcgggtgccagtggtgtcggcgcccgcaccaattaacaggttcacccccagcacgatgcctttgagttgcaaggcaatgtagggcagcacgccgaccaggcagatcagcgccaccaccacggccagggattgggatttgccgtagcgtgcggcgatgaagtcggcgatggaggtaatgttttcctgcttgctgatcagaatcatcttctgcagcacccagggggccaacacaagcagcagaaccggtccgaggtaaatcggcaaaaacgcccacagctgttcggccgcttggcctacagcgccgaagaaggtccaactggtgcagtaaacggccagcgacaggctgtacacccacgcacgcatacgtggaggcagcggcgcacggcggcggtcaccgtaaaaggcgatggcaaacataatggccatataggccagggcaacggcggcgatcagcccgctggacagcgtcatggtaactccgagcatgggaacgcccgggcattccaggcccggttggacagtctcgcatgatgcctggggttagtcagtgtcgaccaaggtcgtgtgcgtggcttttttgggagcagcttgtgtgggagcagctcccacaaaagccaggtcctaccgttcgcggggaggcagggttttctgacgcagaatgtagatcgtcaccaatacggcactggtcaacatgaacccgcgtgcccacggcaggggcaccaggtagcaggagaagccaatgctcagccacatcaggccaatggcgtagaccttgcccttgagcggaatgccattgccgtcgagataatcacgaatccacggccccaggcgcgggtgttcgaccagccactggtaaaagcgcggggagcttcgagcgaagcaggcggcggcgagcagaaggaaaggcgtggtggggagcaccggcaggaagatgccgatcacccccaacgctacgctcagccagccgatggccagcagcccatagcgcaggagcagcgagcgattgcccatgggtgtcacgggcaaacgactcagtgatgacgtggcttgaggatcgccggtttttcatcaggcgcgttgcacagcaggtacagcgcggtcagggcttcagggatctgtacgatcatgtcgtccatcaggttggcgtcggcggcgatgtcggagaactccggctggtcgtcgaacaggcccgagccgaccatgatcggcagcagcatttcgctgacttcttcctcggcggtttcgaaccaggcggcctcacgcaggaacacgccttccatgaaaccgatgcaccagccgcgcaggtcggagtcgtccggctcttcgcccaggtccagctcgcaaggcagctcgaactcttcgtcggaggccagttggcgaccgatgtgggccttgagggccagcagggtggattcgatttcttcgcgctgggcggcgtcggcgtaatggggctcttcagcgaacagggcgtcgatccactcacggtccggcacgatgtcggaacagatcgacagggcggtcagatagccgtgggcggccacgtagtccagcgcctcgtcatgcagctcatcggcgtcgaggaaggcttgcaggcgggttagttgctcagcgaaggacattgacggattaccttgggaataaacgatgctgaattctaggcgttcttgagcgcccaggccagccgccatgcagatttgccaggttttagagacgggctgcaattcgtcagcggtgccctttgccgaaggttgctcgggtatactgccgcgttttgtgatgcccctgcaggccgagcgccaccccgggaaaacttcgcttacggattatttcccgtgatccggtgttttttcggccagcctgtacagagggatttcggcaccattttggagttttacatgctcgagcaggctcaacgcgtcctcaaggacatcttcggctacgacagttttcgtggccgccagggtgcgatcattgagcgcgtggccagtggcggtgatgccctggtgctgatgcctaccggcggcggcaagtcgctgtgcttccaggttccggcactgttgcgtaatggcttggcggtggtggtgtcgccattgattgctttgatggacgaccaggtggccaccctagaagagctgggtgttgccgctgcgtccttgaactccacgctcagcgccgagcagcagcgcgacctggcggcgcggatcaagcgcggtgaagtgaagatgctctatctggcccccgagcgcctcgtgcagccgcgcatgctggccttcctgcagagcctggaaattgcgttgttcgccatcgacgaagctcactgtgtgtcgcaatggggccatgatttccgtcgtgaatatttgcaactggggcaactcgccgagctgttccccgacgtgccgcgcatcgcgctgaccgccactgccgacaaacgtacccgcgaagaaatcgtcgagcgcctgcatttgcagaatgccgagcgcttcctgtcgagcttcgaccgtccgaatattttctaccgcatcgtgcccaaggagcagccgcgcaagcaattgctggccttcctgtccgagcggcgcagcgatgcgggcatcgtctattgcctgtcacgcaagaaggtcgatgaggtcgccgcattcctgtgcgagcaaggctacccggcgctgccgtaccacgcgggtttgcccaacgaaacgcgctcggctcatcagaagcgcttcctcaacgaggaaggcctgatcatggtggccaccatcgcgttcggcatggggatcgacaaatccaacgtgcgttttgttgcgcacatggacctgcccaaatcccttgaagcttattaccaggaaaccgggcgggccggtcgtgatggtctgccggcggatgcctggatggtctacggcctgcaagacgtggtgatgctcaagcagatgctgcaaaactccgagggcgacgagcgccataagcgtctggagcaacacaagctcgatgccatgctgtcgctgtgtgaagagacccgctgccgccgtcaaacgctgctggcgtacttcgatgaggacatgcctgaaccttgcgggcactgcgataactgtaccgatggcgtgcaaacctgggatgcgaccgagcctgcgcggcaggccttgtccgccattcaccgcaccggccagcgctacggtgttggccacctggtggatgtgttgctgggtaaggacaacgaaaaaatacgcagcttcggccacgaaaagctctcggtctacggcattggcaaggcccgcgctgaaggcgaatggcgctcgttgttccggcaaatggttgcgcgcaacctggtcgacatcgacatcgaaggctatggcgggctgcgcttgaatgacagttgccggccgttgctcaagggcgaagtgagccttgagctgcgccgcgacctcaagccgcagaccaccgccaagagcagcagcaccagccaggccagccaattggtgcgtggcgaagagcgcgaacagtgggaagccttgcgcaccctgcggcgcaaactggcgcaggaacacagcgtgccgccttacgtcattttccccgactccaccttgctggagatgctgcgcgagcagccgaccactatggccgagatggcccgggtcggcggcgtcggtgcacgcaagctggaacgttacggccaggccttcctcgaagtgctcggcggtcaggccgaagcgccgaaggaagtggccgatattcgccacgagctgatcagtctggcgcgcgcgggcatgaccccgatccagattgctggccagctgcaatgctcggaaaagaacgtgtacaccttgctcgccgaatccatcggcaaacagcagttgtcgttggagcaagcccttgatctgccggaagatctgctgggtgaaattcaggatgccttccttgatggggaaggcgaattgccagcagttacggagatcgcgccgctgtttaccgggcgcgttccagagggtgttttgtactgtgtgcgtgctgctttgcagtccgaattcgaaatttagtgcgccaattgcgacaatgtaacgaatcagtacatagcgacacttgcctactggcatggctcatgcttagctgactaataattagccacactttattttcagtctaaaaaatgagttttttatgtcgttaaccgatcaacaccgttttggcatgcagttggcgcaaatgtcgcgaggttggcgcgccgagctggaccgccgcctggcggggctggggctgtcccaggcacgttggctggtgctgttgcacctggcccgtttcgatgatgcaccaacccagcgggagctggcgcaaagcgttggagtggaagggccgaccctcgcccggctgctcgacagcctggaaggccagggcttggtgcagcgccaggcggtggtggaagatcgccgcgccaagcgtattttgctgtgtgacacggcccggccattgatcgagcagattgaaaccattgccacggccctgcgccatgagttgtttgtgggtgttgatgaagcagacttgagcgtgtgcatgcgcgtgcatgggcacattctggcaaatctggaaaagccctgatctcaagcacattgaagatcaaaatgtgggagctggtttgcctgcgatggcggtggctcagtcagcttgtttggcgactgatgcaccgccatcgcaggcaagccagctcccacagttggttttgcattcgggttttagaaggtctgacccaggttcaaatacaccgcctgctcattggcatcattgaagccgtagctgaaattcagcggccccaacggtgtatcaaaccccaggaaaatactcgccgcgttgatatatccgctgtcgaactggttgtcattgttccacgcccggccccgttccaccgaggccccaaggtacagcgggaagtccagcggcaggtacgagcgaggcgtcagccgacggtagtacaccgcgcgcatcagggcgatgttctgccccgaaatagcatcttcgcgaaagcctgacagctgccgcgcaccgcccagcaggaagctggaaatcaccacgtcggatttgtccagggtgcgcccgtaacggccgcccaggatcagtgtatccgggccgtggctcatggccttgtccagcttgaactcccattgacggtagcgctggtccgaacccaggccgggttcgaattcacgaaaggccaggccgatgtcttcgcccgtatgggggaaatacacgttatccagggaatcgaaggagtatttcagttcatagaaaccttcgctgaagctcacgctgggaaggtcgcggtcgccaatgcgcacgtccgccttgccccaggcttcgccgacgccgaagcggatttcgccgctggtgccgatctgccgccccacgttcaagccaaaaccgtaacgttccaggcggtattcggagatggggtcgttgtccagaatcagttcaacattctgcgcctgggcactgatatagggcgcgacgaagtagcgtgagccggtatccagcggctggtagaactcgctgtagagctcctggcgatcgccgatctgcacccgcgtcagccactcggcgccgagacgattgatgccgttcatgcggtagctggcgccgaggttgaaggcgctgtcaccgcgcatgtcatccgacaggttcaggcccaggcgcaggtaatcggtgccggcacgtttgccgcgtgcgctgatcaccaaggtgttgtcctggccttttttcaccacgcggtactgcacctgctcgaagtagtccagcccgtacagggtgcccatgtcggtttgcaggcggcccaggttcagcggctcgcccagggtttggcggatgtagtagcggatcacgtcgtcgctgactttggagtcgttttccactttgatcgcggtgatcaccggggtgcgttcccccggggtgcgtgcggccaccagttccgggtcgatcggttgggcagggcgcagatgggccaggcgcaggccgagggcgcgggtggcccggtaaccggcatcgatcatgtccttggcgcgcccgaagtccgtcaccccgtaggccgccagcggtggctggatcaacacgtccttggggtgcagcgccttgagttgttcttcggagttgctccgggtcatcagcgtgatggactggttcagcacgtccaccacggtgttcaactgtttacgtgagcgcagcggcgtgccgatatcgaccacgatggcaatgtcgacacccatctcccgcgccacatccagcgggatgttgtcggtcatgcctccgtccaccagcagccggccgtccagttccaccggggcgaatacggccgggatcgacatgctggcgcgaatcacctggggcaggtggcccttgttgaacaccactttttcacccgtggtgatgtcggtggccacggcgcgaaacgggatcggcagcttgtcgaagttccgcgtgttgctgctgtgggcgaacatgctttccagcagcagggcaaggttctgaccctggatcacgccgagtggcaggccaaggctgccgtcgtcgcggaagctgagcttttgtttgaccaggaaatcccggtcatcctgcttgcgccgaaacggcacgtcctcccgtggcggtgcgtcggacagcgcttgctgccagtcgatattcagcgccagtttctccagctcatcgatcttgtagcccgacgcatacagcccgccaatcaccgcgcccatgctggtgccggcaattgcgtcgatctggatgccttgctcctcaagggccttgagcacgccgatatgcgccaggccacgggcggcgccgccggacagcaccaggccgattttcgggcggggtgcttcaaccgcgtcggcgaggagggggatcaggcacagaaacaggcaggacagcaggcggcgcatcatgaatctcggggctgggcgataaaggccggtattatagccacccgttccaccaagcctgttatgccaggagcctctcaaattatgtctgcaagcaaacccgaaatcgtcatcacctattgcacccagtgccaatggttgctgcgcgctgcgtggctggctcaggaattattgagcaccttcagcgacgacctgggccgcgtggcgctggaaccggccaccggcggtgtattccgcatcacctgcgatggcgtgcagatctgggagcgcaaggcggacggtggctttccggaggccaaggtgctcaagcagcgcgtgcgcgatcagatcgacccgcagcgggacctggggcacaacgaccgcacggtgtgatgatcaggcggtggccgccggttgcttggcctggctggcgcctcccgtcaagccggacagcacgatggcgataatgatcagcgcgccgccgagcagcatgcgcaaggtcggggtttcggcgaacagcagccaggccacggtgatgccgtagagcggctccatggcgaacaccaccgacgcagtgcgcgccttgatcaccgcgaggctggcgacaaacaggctgtgggccaggccggtgcagaacaccccgagcaacccgatccataaccagtcaaccgcgcgcacatccgccagccccggcgctgccacgggcaacaggcaggcggcgaccaccacgttctggcacagcgccgcttgcaccgccggaatccgcccggcgctggcgcgattgttcagtgacaataaagagaacaacagccccgacgcgatgccccacagcaacccgccggtggcttcgctggcgaggttgaagtccggcgtgaccagcaccaggccaacggtgaccaaggccaccagcacgacttcgttggcgcgaatgcgttcgcggaagatcaacccttcaaggatcacggtaaaggccgggaaggcggtaaacccgagggtggccaccgccacgcccgcgactttgacggcaatgaaaaacgtcacccaatgcgccgccagcagcacgccgctgatcagcagccggcgccagtcgcgcatttccagttttttccacggggcattgctggcaaaccgcgcaaacaccgccagggcgacgaccgcaaaggcggcgcggccaaatacgataatggccggcgacgcggccgccagcttgccgaatacgccggtgaggccaaacatcaatgcgccgatatgcagggcgccgagggctgagcggggagtcattgcgatccttgaagctgcggggtgtcagaaatcgcagtctagagcgtgacggggaggagtgtctgtcgttcggctcgcgatttttatcgcaagactcttcctacgacgcccgccgcagtgcgccgggggaagcgccaaactcacgcagcatcgccgcggcaaacgcactttgcgaactgtagccgacgcggttggcgacttcgccgataggcaggggcgtttctcgcagcagcttcaaggccattttcagacgatgactgcggatgtagtccatcggcgtctgcccgcattcggccatgaagcgcgcatgcaggcgcgccacggagaggtcggcaagccgcgcgaggtccgccacctgcagcgggtgcgcggcgtgccgctcgatatgtgcattgaacgccgcgtagggcaggcgccgtcccggtagcggctgggcgaggggatggttgaggctggccagcaacaataccgcgccttgctgcacgatcagtgggtcgtccaccggactgtgcgccagccattgcaccaactggctttgtcgcgagtccagcgtcagccgcgcaggttgatcgagcaggcggcggctggcatcggcatgttcgcccagcgattgcagcacccagtgttctgtcggcacatccagcaccaggcaacggctgccgtcgcggctgccgcaggcatggtgtgccgagaagggcaaaatcacacgctgctttcgtgcacttggctgccacggccatccacttcgaggtccaggtgcccggacaggccgaacaccaactgcgcatggtcatggctgtgggcgaggggcgcttcgatgtagtggcgcagtgtgagggtcgggctcatcacggtctcctgggctgcaggccgccagtctacaacgcttcgcgagccttgagcgctgtcatcagactgacgcgaagttgtcatgggctattaactgccggggtgcaagctcgcgaaaacaccgtcgagggatgcccatgaccagtgccgagttcgccaagcccagccgcaaacaacgggttcgtaccctgtggatttccgacgtgcacctgggcacccgggattgccaggccgaacacctgtcgcaattcctcaagggctaccatgccgacaaggtctacctggtgggggacatcatcgacggctggaaaatgcgtggcggcatgtattggccccaggcccacaccaacgtgatccgtcgcctgctgaccatggccaagcgcggcaccgaggtgatctacgtcaccggtaaccacgacgaattcctgcgtcgctattccaagctgatcctgggcaatatccaattggtggatgaggcggtgcacgtcactgccgatggccggcatttgctggtgatccacggcgaccagtttgatgtgatcacccgctaccaccgatggctggcgtttctgggcgattcggcctacgagttcaccctcacgctgaaccgctggctgaaccactggcgcgcgcgttatggctacggctactggtcgctgtcggcttacctcaagcacaaggtgaagacggcggtgagctttatcagtgatttcgaagaagccatcgcccatgaagtgaccaagcgtgagttgcatggcgtggtgtgcgggcatattcaccatgccgagattcgcaaggtgggcgaggtggactacctcaattgcggggattgggtggagtcgtgcacggcgttgattgagcactgggacgggagcatcgagctgtaccggttggcggatgcgcaggcgaaagaggcgcagttgaaagccgagatggtcacaggctgaaggattcactcggtataaaaatgtgggagctggcttgccagctcccacactgttttgtgtttcttcagctaggtgtttgagacgtccgcgatggcttgggccagcagggccagccgcgtggcgtcgacgccggccatactcgcccggcccgaactcaccatatacacgctgtgcttctcgcgcagttgcttgacctgctcagcgctcaagccggtgtaggaaaacattccgcgctgcgcaccaatgtgtgcaaaccgctcggccagcccgtgaggcgccagcgcttccaccagcccggaccgcaggtgtgcaatgcgcgagcgcatggcttccacttcgtcgccccagacctttttcagctcgctgtcgccaaggatcgtcgcgacgatcgccgcgccatgatccggcggcgtcgaccagaggttacgcgccgtgttggcaagctggctgcgcacatcgatgagcttctcggcatccgccgcacacacgatcagcgcgccgacgcggtcgcggtacaggccgaagttcttcgagcaggagctggtgatcagtacttccggcagctcggcggcaaacagtcgtacggcccaggcgtcttgctccaggccatcgccaaacccctgataggcgaagtcgatcagcggcaacaggtggcgctcgcgcacgatgttcagcacctggcgccagtcatcccgggacaggtcgaaaccggtcgggttatggcagcaggcgtgcagcaacaccacgtcgccctctggaacagcggcgagggccgtcagcatcgcagcaacatccagacggttgtcggcgcccacgtacggatagtggctgaccttgagcccggctttggcaaagatggtttcgtggatcggccaggtcgggttgctcagccagacgccacggcctggcaggttttgggcgataaagtcggcactcaggcgcaacgcaccggtgccgcccggggtttgggtggcgccggcacggcgttcgcggatcaaggctgaatcgtcgcccaacaccagctcgctgatcagcgcgccgaaagccgggttaccgtggccgccgatgtaggtcttggtggtctgtgtgtcgaccaggcgctgctcggcaagttttaccgaatgcggaatcggcgtcaggcccctgtcgtccttgtacacgccgacgcccaggtcgaacttattcgggttggcatcctgggcatacaggtccatcagcccgaggatcgggtcgccgggcacgcgggcaatcgcgtcgaaatgcattacttgcggccctcggcgtccttggcgacttcatcagtgcgcgcggccatgatgaagtcgttgcggtgcaggcccttgatggagtggctccaccaggtcacggtgaccttgccccactcggtgagcaggcccgggtgatggccttcggcttcggagatttcccccatggcgttagtgaaggccagggcgaacttgaagttcttgaacaggaaaaccttttccagctgcatcacgccgtcgcggacttcgatgttccagtcggggatctgcttgatcagtaccggcaactcttcatcgctgacttgcggggcgtcggcgcggcaggcttcgcagtgggcttggttcaaggtggtcatgaaaggtgtcctgaattcgaaagtttgaagatcagtggcgtcaccctaaagcaacgcgcggccagggaaaaggctcacctggcctcaagatgtaaggttcacgcggctttaggcttcggtggaaacttcggcgcgtgcaagcccaactgcataccgcgttcaaccatgcccatgatgtcttcctgcgccacgtcgaacaggcgcttgagctcgggcaggacgaaatacagcggttgcagaatgtcgatgcggtatggcgtgcgcatcgcctccagcgggtcgaaggcttgatgctcgggctcatccgacaggcagtacacgctctccttgggcgacgacaaaataccgccaccgtagatgcgccgaccttgcggcgtgtccaccaaaccaaactcgatggtcatccagtacaggcgcgccaggtacacgcgctgttccttggtggccgccaggccgagcttgccgtaggtgtgggtgaattctgcgaaccaggggttggtcagcagcgggcagtggccgaagatctcgtggaaaatgtccggctcttgcaggtagtccagttcttcgcgggtacgaataaaggtcgccactggaaactgtttgctggcgagcaattcgaagaaggtctggaaggggatcagcgccggtacacgagcgacttgccagccggtggtttcggccagcacggtgttgatttcgcccagttgcgggatgcggtccaggggcaggccgagcttgtcgatgccttccaggtattcctggcaagcacggccctcgatcactttcagttggcgtgtgatcagggtgttccacaccgcgtgttcttccggcgggtagtggataaaaccactcgcatcgggctcgcgggccacgtattgcgtctgcttcatacggctctcctgctaggcattcgttcttgttatgtcctgcgatgtgcctattgataacgcggacggcgccggattccatcggcttgcgggtgggggctgtaggaaaacttacagtttttcgtaaggttttcgttacgaatgtgcggtttgtcggtttggcgggctgtgaaaaggtcacgggctgtcacataatcttgacgactatctgcactcgaccacaaaaagtcggggtgccttgccacttttcggaccttttcatgcgtatcaaagtgcactgccagaaccgcatcggcatcctgcgggacattctcaacctgttggttgagtacggcgtcaacgtcgccaagggcgaggtcggtggcgagcatggcaacgccatctacctgttttgcccgaacctggtgaacatgcagtttcaagcgttgcgcccgcagttcgaggcgattgccggggtatttggggtcaagcgggtagggttgatgcccagtgagcgtcggcacatggagcttaatgcgttgctgggtgctctggagtttcctgtgctgtccatcgacatgggcggctccatcgtcgccgctaaccgcgcggcggcgcagttgcttggggtgcgcgtggacgaagtgcccggcattccactgtcacgctatgccgaggatttcgatttgccggagttggtgcgcgccagcaagtcacggatcaatggcctgcgggtcaaggtcaagggtgacgtgtttctggcggacatcgcgccgctgcaatcttccgaacacgatgacagcgaagccatggctggcgccgtgctgaccctgcaccgcgccgaccgcgtgggcgagcgcatctacaacgtacgcaagcaggagttgcgcggcttcgacagcatcttccagagctccaaaatcatggctgccgtggtgcgtgaagcccggcgcatggcgcctttggacgcgccgctattaatagaaggcgaaaccggtaccggcaaggagctgctggctcgcgcctgccacctggccagcccgcgcgggcagtcgccgctgatggcactcaattgcgccggcctgccggaatcgatggccgagaccgagctgttcggctacggccctggcgcgtttgaaggggcgcgggccgaaggcaagctgggcctgttggagctgacggcgggcggtacgttgtttctcgacggtgtcggagaaatgagcgcgcggttgcaggtcaagcttctgcgctttttgcaggacggctgctttcgccgtgtgggcagtgatgaagaggtctacctggatgtgcgggtgatctgcgcgactcaggtggacctgtccgagctgtgtgcccgtggcgagtttcgccaagacctttatcaccgcctgaatgtgttgtcgctgcacattccgcctctgcgtgattgcctggatggattggcgccgttggttgaacattttctggatcaggccagccggcagatcggttgcccgttgcccaaactggcgccggcggcgatggatcggctcagccactaccattggccgggcaacgtgcggcagctggaaaacgtactgtttcaggcggtttcgctgtgtgacggtggcacggtcaaggccgaacatattcgcttgccggattatggcgtgcgtcagccgcttggcgatttttcgctggagggaggtctggaagcgatcgtcgggcggtttgagaaggcggtgctggaagccttgtacgcagagcattccagcagccggcagttgggcaagcggctgggcgtgtctcacacgaccatcgccaacaagctgcgtgattacgaaattctcaagaccgaacgcggttaaaactgtggaaaccggtttgcatgtggcgagggagcttgctcccgctgggctgcgaagcggccccaggattttgggagcgctgcgcgctccagcgggagcaagctccctcgccacatgcaggcaagccagctcccacatttgatttgtgtcgttgccgcaggcggcagtagtccgccgttttttcgactctgcaagtgcattgaaatcttcacgccttcccgaaacccccgccccgcctgggcttcatcctcttttaaaaagttggaccgcaaattgcttaagcctcatcagtacagcggtgggcggcaagcgtccgtcagaaagaggataaagcgtggacaagtacctttatgtggcaatgaccggcgccagccagaatgcactggcgcagaaggcccatgccaacaatctggcgaacatctccaccaacggttttcagcgtgacctggaacaggcgcgttcgatgccggtgttcggtgacagctttccggcgcgggccttcgccttgaccgagcggccagccacggacttcacccccggcgccatgatcgaaaccggtcgcgaccttgatgtggcggtcagcggcgacggttggattgccgtgcaaacccccgatggcggcgagtcctatgtgcgcagcgccagcatgaacatcgatgcactcggcgtgctgcgtaccggcaatggcatgccggtgatgggcaacggcggcccgattgcggtgccgcccgagcagaaagtcgaagtgggtgccgatggcaccatcagcatccgcgccatgggcgaaggcccgcgagtgatggctgaagtggaccgcatcaagatggtccagcccgccctcaagaacatgaccaagggcctggacggcaccatccacaccaaggatggccagccggcacaggccgacgcgaacgtgcggctgacctcgggtttcctgcaggcgagcaacgtcaacgcggtggaagaaatgacggcggtactggcgctttccaagcaattcgagctgcacatcaagatgatgaacagcgccaaggaagacgaccaagccatgacccgcgtgctggcgatgagctgattgccgcgtcactgaagactaattttgcagcgcagcgccaacaaacaggcgcacgaaggagaacactatgcttccggctctatgggttgccaaaacaggtttggccgcgcaggacaccaacctgaccaccatttccaacaacctggcgaacgtctcgaccacgggcttcaaacgtgaccgcgccgagttccaggacttgctctatcagatcaagcgccagccaggcgcccagtcgacccaggacagcgaactgccgtcgggtctgcaattgggcaccggtgtgcagatcgtcggcacccagaagaatttcagtgccggtaacctgcagcaaaccaaccagcctctggacatggccatcaacggccgtggcttcttccagatcctgcaaccggacggcactacttcctacacccgtgacggtactttccacctggactccaatggccaggtcgtgactgccaacggcttcgccctggagccggcggtggtcgttcccgccgatgccaagacctttaccgtcggcaccgacggcaccgtgtcgatcaccgtggccggcaacccggcgtcgcaagtgatcggcaacctgcaaaccgccgacttcattaacccggccggcctgcaggccatgggtaacaacctgttcctggagaccgcttccagtggcgcgccgcaaatcggcacgcccggtctgaacggttttggcaccacgctgcaaagcacgctggaaacctccaacgtgagcacggttgaggagatggtcaacatgatcaccacccagcgcgcctatgagatgaactccaaggtgatttccaccgccgaccagatgctttcgttcgtaacgcagaatctgtaatcaagtctatggggtgccactgatggcgcctgcaacaccgtgaggtaagggtcatgaatcgctatgtttctgttctggcattgagtgggatcgctgtgctcgcgggctgtgtcgccccgacgccgaagcccaatgacccgtactacgcgccggtgttgccgcgcacgccattgccggcggcggccaacaatggctcgatctaccaggccggtttcgaacagaacctgtacagcgaccgcaaggcattccgggtcggtgacatcatcaccatcaccctgaacgagaagacccaggccagcaagaacgccaactcgcagatcggcaagaccagcaagaccagcatcggcctgacgtcgttgttcggcggcggcctgaccaccaacaacccgctgggtgatggtgacctgagcctcaatgccggctacagcggcgaccgcgccaccaatggcaaaagcgcggcagggcagggcaacagcctgaccggttcgatcaccgtgaccgtggccgacgtgctgcccaacggcatcatcgccgtgcgcggtgagaagtggatgaccctcaacaccggcgacgagctggtgcgtattgcaggcatggtccgcgccgatgacatttccaccgacaatacggtgccctcgacgcgaatcgccgatgcgcgcattacctattcgggtacgggttcgtttgctgacgcgagtcagccgggctggttcgaccggttcttccttagcccgctgttccctttctaggtggccattttgaaactcaaacagctgatggcggccgcgctcctgctttccttaagcgctgtcgcccaggccgaacgcctgaaagacatcgccagcatctccggcgtgcgctccaaccagttgatcggctacggcctggtcgtggggctcaatggtacgggtgaccagaccacccagaccccgttcaccctgcagaccttcaacaacatgctctcgcagttcggcatcaaggtaccgccaggctcgggcaacgtgcagttgaagaacgtggcggccgtgtccatcagcgcggatctgccggcgttcgccaagccggggcaggtggtggacatcaccgtgtcgtccatgggcaactcgaaaagcctgcgtggcggcaccctgttgatgaccccgcttaaaggtatcgacggtaacgtctacgccatcgcccagggcaacctggtggtgggcggtttcgacgccgagggccgcgacggttccaaaatcaccgtcaacgtgccgtcggccgggcggattccgggcggcgcctcggtggagcgtaccgtgcccagcggtttcaaccagggcaacagcctgaccctgaacctcaaccgttcggacttcaccaccgccaagcgcgtggtcgacaagatcaacgacatgctgggccctggcgtggcgcaggccatcgatggcggttcgattcgtgtgactgcgccattggacccaagccagcgtgtggattacctgtcgattctggaaaacctggaagtcgacccgggccaggctgtggccaaagtcattatcaactcgcgcaccggtaccatcgtgatcggccagaacgtcaaggtgtcgccggctgcggtgacccacggcagcctgacggtgacaatcaccgaagacccgatcgtcagccagcctgggcctttgtccaacggccagaccgccgtggtaccgcgctcgcgcgtcaatgcccagcaagaagccaagccgatgttcaagttcggccccggcaccaccctggacgagattgtccgtgcggtgaaccaggtgggcgcagcgcccggcgacttgatggcgatcctcgaagcgttgaaacaggccggcgccttgcaagccgacctgattgtgatctgaggccatggccatggatatgcgcaagagtggggtcagcagcacggcggactcggggtcttactccgacctgaaccggctgaaccagcttaaggtcggcgccgacaagaacagcgatgccaacgtgcgcaaagtggcgcaggagtttgaatcgctgttcctgagcgagatgctcaagtccgcgcgctcggccaccgaggcgctgggcaaggacaacccgctgaacaccccggcggccaagcagtaccaggaaatgtacgaccagcaactggcggtttcgatgtctcgcgaaggcggcggtatcggcttggccgacgtgctgatacgccagatgcagaagaacaaaccggtggatgctcaggcggccacgttgcagggcccggcagctgatgcgccggtcaagaaagccgatgtgccgactgaaatcgctgcgggcacccaggccaatgggccgttgggccgctccaatggccagcgtcccctgtgggcttaccgcgttgccgtgccggaaggtgccagtgcgcacgccaacgatatggagttgatgaaccagcgccgtatttctctgccgagccggctgaccgaccgcttgctcgccgggattgtgccgagtactgacgcggctgccgccaaagccgcgccgctgcgcaacagcgccgccgacgacaatgtgatcaacagcgccgcgcacagcctcgccgtgccgagcgggcgcatgcaggtgtatggccgcgccatcgcccagccgccgctggcgccggcgaagaaggccttcagctcccaggacgaattcgtcgccaccatgttgccgatggccaaagcggcagcggcacgtatcggcgtcgatccgaagtacctggtagcccaggccgcgctggaaaccggttggggtaaatcggtgatgcgcgccgaggacggcagcagcagccacaacctgttcggcatcaaggccggccagagttggcagggtggccaggcccgtgcgattaccagcgagtttcgcgatggggcaatggtcaaggagacggcccaattccgttcctataactcttaccaggacagcttccatgacctggtgacattgctgcaaagcaatgatcgctataaagaagttgtgaagtcagccgacaacccggaacagtttgtacgcgagttgcaaaaagccggatatgcaaccgacccggactacgccagcaagatttcgcagatcgcaaaaacgatgaacagttaccagaattacgctgccgcgggcgcgaccactcatttataaggtctgaatcatgagtttgctcagtatcgggatgtcagggctaaacgccgctcaaggctcgttgtcggtcttgagtaacaacattgccaacgtcaataccccgggatactcgcgccagcagaccacccagaatgccagcgccaataaccagtacggcggggtgttcatcggcagcggcacgaccctggcggatgtgcgtcgcatctataacgatttcctcggcgccgcttaccagagcagcaccgcgctcaacagtgatgccacggcttacgcgggccaggccgccgcaatcgacaagactctgtcggacaaatccacgggcatgtcggctgcgctcagcgcgtttttctcttcgctgcaaaccgctgcggccacgcctagcgatgtgtcggcccggcaactgctgctgaccagcgcgcagaccttgagcaaccgctttaactcgatttccacgcagctgactcagcagaaagagtcgatcaacggccaactgggcaccatgagtgaccaggtcaacaagctgaccgcctcgattgcttcgttgaacacccaaatcgccaccgcccagggctcttccaccagcgcgccggccaacctgctggatgcacgcaacgaagcggtgcgttcgctcaatgagctgatcggcgtgacggccaccgagaaagacggcaagttcagcgtgaccacgggtaccgggcagtccctggtcgacggcgggatcgccaatacgatttctgcagtgccgagcaagactgacaacagccaatacacgatccagctgaaggtgggcgacacctcgatggacatcggttcggtggtctccggtggcagcatcggcggcctgttgcgttatcgcgatgacgtgctgatgccggccatcaacgacctgggccgcattgccatcgccacggccgacagcgtcaacagccagttgggccagggcctggacttgaacggtgatttcggctcgtcgctgtttggcaacatcaacagcccgacggcgattacccagcgcagccaggcggcttcgggcaacagcgcaggctcgggcaacctgaacgtgacgattgccgacagcagcaagctgtcgaccttcgactataaggtcaccttcaccagcggcaaccagtacaacgtggtgcgttccgatggcaaggccatgggttcgttcgacaccacgaccacgccgccgccggtgatcgacgggtttaccctcgcgctcaatggtgccgggccggttgccgccggtgacagcttcaagatcagcccgaccgccaacggcgccagcgggatttcggccgaccttaaggacccgaacaagatcgcgtttgccggacctttggccggcaacgcgagcaaaaccaacaccggcaccggtacgttcacgccgccgacattgaccgtgccgatcgatatcaatggcggcgccaccacggcgcaactgcgcaccgggatcgaaaactcgatgcccgtgaagatggtgttcggcaagccggcggcagacggtacccagccctacacgctgagcgacgcccagggcaactcgatcggtaccggcaccatcatcccgggccaggacaacaagatcaccgtcaatgtgccgatgcgcgacgccagcggcgcgttgatcccgggcaagagcttcggtttcgataccaccgtggccggtgcacctgccaacggcgacagcaccaccttttcgttcaacagcggcgcgacgtccgatggccgtaacgctcaacaattgctggggttgcagaccaaggccaccgtcggtgcggtcgatggcaatgcgggcgtgagcctggtgtcggccaacagccggctggtgtcccaggtcggctcgaaagcggcccaggccaacaccgacagcaccgccaccggcgccttgctggcggcgaacaaggcagccagcaactcggtgtcccaggtcaacctggatgaggaggcgggcgacatgatcaagttccagcagtactacaccgcgtcgtcgcagatcatcaaggccgcgcaagaaaccttcagcacactgataaacgccctttaaaggagtctggaacgatgcgtatctctacacagcagtatttcgacaccagctccagcaagtatcaggacaactattcgggcgtggtgaaggctcaagaccaagcgagctccggtgtgcgcgtgcagaccgccgccgatgatcctgtcgctgccgcccagctcctgctgttgcagcaacaaaaagacatgctgggccagtacagcggcaacatcaccagcctgcagaactcgttgaccaacgaagaaagcgtgctggcgagtatcaacaccgcgatgcaaaccgcccagggcctggcgctgcaagcgggtaacctgcaactgagcaacgacgaccgcaaggcgattgcagcccaggtcggcgcgctcgaggaccaagtgttgggcttgctcaactccaaggattccagcggcaattacatgttctccggggccaagaccgatacgccgccttacagccgcaacaatgacggcacctacagctatcagggcgatgaaacgccgctgagcctgcaggtgtcgagcaacctgtcgatcgccgtcggcgataccggcaagaccttgctcgagagttcatccaatgcaggccgtacccaggccacgctgttgccgccctcggtcaacgacggcaaggtctcgatttcggcgggcctggtgacctcaagcaccgcttacaccaagagtttcgccgacggccagccttataagctgaccttcgccagcagcacccagtacagcgtgaccgacaaggacggtaacgatgtgacctccgaaatcaccggcaacggcacgttcgactccaccaaggaaggtgcttccagcgtcaacctgcgcggggtcaaattcgatatccggctgaacctgggggcggacgttgcaagtggtccgtcttctgacgcgctggtggcgggcaaggcgttcacgctggagagcaagccggacagcttcagtgtttcgcgcacggccagcaatgcgtccactgcgcagctgaccggtggcagcgtcaccgatcaggcggcttacgccagtacctttcccaacgcaggcgcggtcatcaagttcaccagtggcaccgattatcaggtgttcgcccagccctacagtgctgacagcaaagccattgccagcggcaccatcgcggcgggcgcgacgtcgatcacggcggccggggttacttttggcatcagcggtacgccgggcgccggggaccagttttcggtcggcgccaccagcaacaagaacatgaatgccctggataccttgggccaattgcgcaaggctctgctgacgccggcagatggtgatcaggttgccaagaacaacctcaaggatgtgctgaacaccaccaccgccaacctggccaatgcctcagcgcagatcgaccaggtgcgcggctccatcggtgcgcggcagaatgcgctggatatccagggccaggagaacaccagcctgggcttggccaatacctcgaccatgaactctctggccaacgtcgacctgggccaggcggcgattgacctgaatctgcagcaaaccatgttgcaggcctcgcagctggcctttgtgaaaatttcccagttgagcttgttcagccgtatgtaatcggcgtaataacaaacggcccaccctggcaacagggtgggccgttgtcgttttgggcgggcgcaatgttgccgggttttgcataaaccgcacaaaattgagtgacctgtgagtcataaagcgcatcttcactgtatcgtgtgaaaaggataagtcggctgcgggtctttatgcggcggctttcagcgagatttttatggggttatcccctttattgtcagcactcccggcgtagcccgaggggtgttctccagctatttagtattgggaagccacaatgattggcataaaaagcatcgccagttacgtgccggcagacggggtcgataactacgcccagggcgccaaattcgccaaggatgaagaattcatcatcggcaagatcggttcggcgttcctgccgcgcaaggatgctgcgcaggaaacctccgacctgtgcgtcgaggcggtcaacgccttgtttgccaacaacccggatttgaagcgcgaatccatcgacgcgctgatcgtcgtgacccagaacggcgatgaagagggcttgccgcacaccgccgccatcgtccaggacaaattgggcctgccgacccatgtggcggcgttcgatatttccctgggttgctccggctacgtctacggcatctacgcgatgaagggcttcatggaagccaccggcctgaaaaacggcttgctgatcaccgccgacccgtattcgaagattgtcgacccggaagaccgcaacaccaccatgctgtttggcgacgccgccaccgctacctggatgggtgaagacgccccttggctgctgggcaagtcgaagttcggcaccgacggttccggcgcaccgcatttgaaagtcaccgatggcgtgtttttcatgaatggccgccaggtgttcaacttcgccttgctcaaggtgccggcgcatttgcacgagctgctcaatgagtcggacctcaaggccgacgaaatcgatgcgttctgcatccaccagggcagtgcagcgattgtcgacgccgtggcacggcgtttcgaagaggcgccagtggagaagttcatcaaggacatggtcgagaccggcaacaccgtgtcgtcgagcattccgttgctgctggaaaagcacatgatggatgccgactggaagcgtgtggcaatcagtgggtttggcgtaggtttgtcgtggggatcggcgattctctatcgcccgtgacgccctgataggctgcataaaaaacgcccaggcttgaaaaagcctgggcgttttttatttggcgccagaaaagccagcatttgctgaggtttgggctatcgtaaatgcttgaattacaaagggtggcgcggtgccagtaaaaaaaaccaaaaaagtcctcaagcaacgggcttatacgacgataactattacgaaggttctctaggccacacccggcggttgccagggccggaagccgcagtacaccacccacgaggatttcgtcatggctttaacagtaaacaccaaccttgcttccttgaccgttcagaacaacctgaacaaggcttccggcgccctgcaaacttccatgcagcgtctgtcctccggcctgcgtatcaacagcgccaaagacgatgcggccggcctgcaaatctccaaccgtctgaccagccagatcaacggcctgggcgttgcaatcaaaaacgccaacgacggcagctcgattgctcagaccgctgaaggcgccatgcagcagtccaccaacattctgcaaagcatgcgtactctggctctgcaatcggccaacggctcgccaagcgctgaagaccgtaagtcgaaccaggctcaatacgctgctctgacggctgaattgacccgtatcgcaaccaccaccaccttcggtggcaagaacctgctggacggttctttcggtactacttcgttccaggtcggcgccaacgccaaccaaaccatcgacatgagcatcggtaacgttgcagccaacaacattggttcgcagcagctgaaatcccaaggcgttgctccaagcgcaacaggcgttgccggcggcgcgatcgctgttaccggtggcggccagtccaccaacctgaccatcgctgccggtgcttccgccaagcagatcgctgctcagatgaacggcgctgtcggcggcctggctgctactgccagcactgttgctcagctctccgttgactccgctgccattgccggtgctacccctgccagcgccaacttcaccctgaaagtcggtagcggtactgctgtccagttcactggcgtaaccagcacttccgacctggctgaccaactgaagtccaacgctgccaagctgggcatcaccgttaactacgattcgaccactcaatcgctgtcggtcaagtccgacaccggtgagaacctgaccttcaacgctggcgacccaggcgctgttgccggtatcaaagtggctacccaagacggtaatggcaccttcggtactgccgttgctctggctaacaccgcgatcatcgctactggtgcagtttccctgaactcctccagcagctactcgctgagcggcgccggtgtgacgggtctgttcgcagctactggtactgctgccaactccaccaaaaccaccgttaacaacaccgacatcaccactgctgccaacgcacagaactcgatcgacgtgatcactcaagcgatctccgacatcgactcccaacgtgctggtctgggtgctgttcaaaaccgtttcgacaacaccgttgccaacctgcagagcattgccgacaactccactgccgctcgcggtcagatccaggacgttgactacgcggctgaaactgctcagttgaccaagcaacaaaccctgcaacaggcttccactgcgatcctgtcccaggccaaccaactgccttccgctgtactgaagctgcttcagtaatagccacggtagatgactgacggaagggcgcgtttacgtgcccttttgtcttttgcgtgatgaggagattggacatggacatgagtgtgaagctgaacctgtcttatccagcagcggcaccgcagagtgctcctgcacccgtgagcaacgacccgcagcaagccaaggtagatcctgtaccggccgcggttcagacaaagcaggactcgaaaccgtccgacctggaacaggcggtcacggatattcgcaaattcgtccaggcggcccagcgcaacctggaattttcgattgatgactccacccatcaggtggtggtcaaggttattgcgaccgacagtggtgaggtgattcgccagatcccgtcggaaaccgcattgaaactcgcacaaagtcttcacgacgccagcaatgtgctgtttgacgccaaagtctgagctggcatgaattttgttgctgtagctgcttgaggcgtcgttcgtcaataaagcgccagccccggatcaggagaaaagtcatgggtggtattacggttagcggccccgtcacgggtattgatacccagtcgatcgtgaaggccctggtgggggctgaacaggcgcccaagcagtcgcagatcaacaagcagacgcagacatcgagtgcccagctttcctcgatcggcaagattcaggcggctctggatgctttccgcggcgctctggacaatatgtccaaggatgccagtatcggcggcctctcggcgatcacctcggatgccaacgtatccagcgtgactctgggcgctggcgcctctgcgggtagctaccaactggtagtcaaccagttggcgacggcttcaaaagtttccaccaagacgttcgccactggtgcttccacggtcgtcaacgctggcactacggcgacgtccttgaccatctcccaatcgggccagagctacggcgtgactgttccgccgggcgcaaccttgcagcaggtgcgtgactcgatcaacgcacagctcagcagttcgggcctgagtgccaacatcctgaccgactccacgggttcgcggatggtgctgacatcgaccagcacgggcgtcggtaccgacattaccattggcgggaactccgggctggaagccggcacctcggtagtgggtaaccctccacagaatgccaaatacaccattgacggtactgctcaggaatccaagagcaatacgctgaccgatgcaatcagtggcgtaagcatcaagctcaccgcgctgtcgcctttgcctgccggtgatactgatccactcagcaagaaccgggtcgcgtccaccatcacggtcagtcgtaacaccgataccctcaagagttcggtcaagggcttcgtcgatacgtataacgcgctgatcacggccatgaacaccgaaacggctgtcaccaccaacccggacggcacgacgacgccttcggcgttgacgggcgattcgacgatacgcaccctgcagtcggctttgcgcagcgagctgaatgccttgggtggtacaggggccttgaagtccctggcccaatttggtgtgaacaccgaccagaaaaccggcaagctcagcattgacgacaaggtattcggtgcggctgtggcgaccaaccccaccgatatcggcggtattttcaacggtgataccggtttgctggcgcgcatgaagtcggcgaccgacagctatgcgctgagcggtacgggtgtgctcgcgtcacggtcatcgacgctgaccgcaaccctcagtgatctgcaaacccagcaagataccctgaccaagcgcatggccgacctgacgacaagcctgaccgccaagtacaccacgatgaacaacctggtggcccagctcaccagccagcgctccagcgtcatgagcacgctgaacgcgttgaacaagagcagctcggacagctgatccgcactgacgccgcccggtgatcgctcaccgggcgcggcctccagatcatcggcgggttaaagttttgtgtgatcccgtcgacataatgttcatagcccatcctatttagccgttgcctgtcacgaggtagaaacatgaatcccatgagagcccttcgccaataccagaaggtcaattcccatgcccaggtctccgaggccagcccgcaccgtctggtccagatgctgatggaaggcgcgctggatcgcatggctcaggccaagggcgccatggctcgtggtgatatcgcacaaaaaggtttgctgctgggcaaggcgatcgacattttgatcggtttgcgtgacggcctgaatccggagaaaactgatgatccggccgctttgcagcagttggataacctgtatgcctacatgaccacgcgcctgctggaagccaacagcaagaacgatgtcgccatgatcgacgaagtagccggcctgatgatcacgctcaaggaaggctgggacggtattgcaacactgtaggcctttggcctgaggatgatgtcatgagccacgccctgcaacggattgacgagacccgcgaagccttggtcgacgcattggctgcgcgtaactgggacgccatcggtgagttggatttgggttgccgtgcggtgatcgatgaggcgctgcacaatgcgccggtggacgaggacgccctgcgggaaaaactggagagcttgctggaggtttatcagcaattgcttgaggtgacgaccggagaacgccaggcgattttcgaagagatgtcgcagatcaatcgcgcgcaaagtgcgtcaaaggtttaccatctgttcagctgaacgggcgcagttaatccgaacccgcgtcataaatttgactgcgggcgattttttgacttaactagtgctgttttcagatttcagacggttgtgacgcagaaaatgcctacagccatctagattgcccacgagttcagggcatttgagttaactagggaagttgctattgcatgtggcgtgaaaccaaaattctgctgattgatgacgatagcgtccgtcgccgcgatttagcggtgattttaaattttctcggtgaagaaaatttgccctgcggtagccatgactggcagcaggcagtcagctcattgtcgtcgagccgtgaagtcatctgtgtgctgatcgggacggtaaacgctcctggcgcattgcttggcctgttaaagacactctcgagctgggatgagttccttccggtgttgctgatgggcgatatttcttctgtcgacctgccggaagaccagcgtcgccgcgtgctgtcaaccctggaaatgccgcccagctacagcaagttgctcgactccctgcaccgtgcccaggtctatcgcgagatgtacgaccaggcccgtgagcgcggccgtcaccgcgaacccaacctgttccgcagccttgtcggcaccagccgtgcgatccagcacgtgcgccagatgatgcaacaggttgccgacactgacgccagcgtgttgatcctcggcgagtccggcaccggcaaggaagtggtcgcgcgcaacctgcactaccattccaagcgccgcgacgggccattcgtgccggtcaactgcggggcaattccggccgagctgctggaaagtgaactgtttggccatgagaagggcgcctttaccggcgccatcaccagccgtgccgggcgtttcgagctggccaacggcggcacgctgttcctcgatgaaatcggcgacatgccgctgccgatgcaggtcaagctgctgcgcgtattgcaggagcgtaccttcgagcgtgtgggcagcaacaagacccaaagcgtcgacgtgcgcatcattgcggccacccacaaaaacctcgagagcatgatcgaggtcggcagcttccgcgaagacctgtactaccgcctcaacgtattcccaatcgagatggccccgctgcgcgagcgcgtggaagacattccgctgctgatgaacgagctgatttcgcgcatggagcacgaaaagcgcggttcgattcgcttcaattctgccgcgatcatgtccctgtgccgccatggctggccgggcaacgtccgcgagctggccaacctggtggaacgcatggcgatcatgcacccctacggcgtgattggcgtggtcgagttgccgaagaaatttcgctacgtcgatgacgaagacgagcaaatggtcgacagcctgcgcagcgacatggaagagcgcgtggccatcaacggccatacgccggatttcggttccaccgcgatgctgccgcctgaaggcctggacctcaaggactacctcggtaacctcgagcagggcctgatccagcaagccctggacgatgccaacggcatcgtcgcgcgtgcggccgagcgtctgcgtatccgccgcaccaccctggtggagaagatgcgtaagtacggcatgagccgccgggacggcgatgaacagacagacgattgacgcctgtttttcaaaccgctgattaatcagcggttttttttcggcacgggtattgctacagccctcgcaacgttccgtttaactgacggtcagccaagcgagagagcatgatgccccacgccgcccaacacgcttcagcccccgatctctcggggctactcccatctgtagagcagcaaagccggcagggcctggaacaggccttttcgctgttcaaccagatgtcgagccaattgactgactcctacagcttgctggaggcgcgggtttccgagctcaagggcgagttggccgtggtcagcgcccagcgcatggaagagctggccgaaaaagagcgcttggctaaccgcctgcaaaacctgctgtcgctgctgcccggtggtgtgatcgtcattgacgatcagggccgtgtacgcgaagccaacccggctgccgtcgacatgcttggcctgccgctggagggcgagttgtggcgcgaagtcattactcgctgcttcgcgccgcgtgaagacgacggccacgaaatctccctgaaagacgggcgccgcctgtccatcgccacgcgttcgctcgatgccgaacccggccagttggtgctgctcaatgacctgactgaaacccgccacctgcaagaccagttggcgcgccatgaacgcttgtcgtcgctggggcggatggtcgcttctttggcgcatcagatccgcacgccgctgtcggcggcgttgatctacgccagtcatttgactgacgagcaattgccggccgccacccaccaacgttttgctggccgtctcaaagaacgcctgcacgagttggagcatcaggtgcgcgacatgctggtgtttgcccgcggcgaactgccgttgactgatcgcgtcaccccggcggcgctgatgcaatcgctgcaagcggcggccgccactcatattcaggaagccagcgtgcgctggcagtgcgacagccacctcggcgaattgctgtgcaaccgcgacacgctggtcggcgccttgctgaacctgatcgaaaacgccacccaggccagcggcccggacgcgcgcctcaaagtccacctgtatacccgcgaacaaaccctgcgcctgtgcatcagcgaccgtggcgccggcatcgaccccctggtgctgcagcgcctgggcgaacccttttttaccaccaaaaccaacgggaccggcctgggcctgaccgtggtcaaggcagtggcgcgggcccatcagggagaattgcagctgcgttcccggttggggcgtggcacctgtgcattgatgaccttgccgctgttctcaggcgcggcgagcgcggagtaaacgagtgatggctatcaaggttctattggttgaagacgatcgcgccctgcgtgaggcattggctgacacgctgctgttggcgggccatgattaccgggcggtcggttctgccgaagaagccttggaagccgttgagcaggaggcgttcagcctggtggtcagcgacgtgaacatgcccggcatggacggccaccagttgctcggcctgctgcgcgcgcgccagccacagttgccggtcttgctgatgaccgcccacggcgccgtggagcgtgcggtagacgccatgcgccagggcgcggcggattacctggtcaaacccttcgaacccaaagccttgatcgaattggtggcccggcacgccctcggcgtgagcccggcagtcgacggcgaaggcccgattgccttcgaaccggccagtgcgcaattgctggagctggcggcccgcgtggcgcgcagtgattccaccgtgctgatttccggcgagtccggcaccggtaaagaagtgctggcgcgctacattcaccagcaatccagccgcgccaaacaaccgtttatcgcaatcaactgcgcggccattcccgacaacatgctcgaagccaccttgtttggccacgaaaagggctcgttcaccggtgctatcgcggcccaggcgggcaagtttgagcaggccgacggcggcacccttttactcgacgaaatctctgaaatgccgctgggcctgcaagccaagctactgcgcgtgctgcaggagcgtgaagtggagcgcgtcggcgcgcgcaagccgatccagctggatatccgcgtggtggccaccaccaaccgggatctggccggcgaagtggcggcggggcgctttcgtgaagatttgttctaccgcctctcggtatttccgctgtcctggcgcccattgcgcgagcgcccggcagacatcattccgttggccgatcgcctgctgaacaaccacgtcaaaaaaatgaagcacgcccaggcacggttgtcggccgaggcccaggcctgcttgatcagctacccgtggcccggcaacgtgcgtgagttggacaacgcaatccagcgcgcgctgattttgcaacagggcgggttgatccagccccaggatttctgcctggccatgggcagcggcactgcgcctttgcccaggttcgcaccggcgccagcagtggcggccgaagccgagcccggcggcggcttgggtgacgacctgcgtcgccgcgagttccagatgatcatcgataccctgcgcgccgagcgcggccgccgcaaagaggctgccgagcgcctgggcatcagcccgcgcaccttgcgctacaagctggcgcagatgcgcgatgcgggcatggacgtggaagcctatcttttcgccacctgataaaaatttaagccgacagggtttgtcgccttttcttacaagctgccacggagctggcacccttgttgctactacccccagtaaccgctgcgtagtgtcaaaaaattgcgggtcgtcggagagagaaggtcatgagccagggtattgagttcaatcggttgatgttggatatgcgctccatgcaaatggatgccatggctcaaccgaaatccgtcgcgcaggcgccggaattgggccaaagcagttttgccgacatgctcggccaggcaatcaacaaagtcagtgatacccagcaagcctccagccagttggcgaccgccttcgagatcggcaaaagtggcgtggacctcaccgatgtgatggtcgcctcgcaaaaggccagcgtttccttccaggccttgacccaagtgcgtaacaagctggttcaggcttatcaagacatcatgcagatgccggtttaaggacgagatttaagtcatggcagaagcagtcgtggacaacgcacccgccaaggcagacggcaagccgccgctgtttggcctgtcgttcctggaaaacctttcggaaatgaccatgttgcgtcaggtgggcctgatggtcggcctggctgcgagcgtggcgattggttttgccgtggtgttgtggtcgcaacaaccggattaccgcccgttgtacggcagcttggcgggcatggattccaagcagatcatggaaaccctcgccgccgccgacatcgcctacaccgtggagcccaactccggcgcgttgctggtcaaggccgacgacgtggcccgcgcgcggatgaagcttgccgccgccggcgtgacgccgtccgatgcgaacatcggctttgaaatcctcgacaaggaccagggcctgggcaccagccagttcatggaagccacgcgctaccgccgtggcctggaaggcgaactggcacgcaccatctccagcctgaacaacgtcaagggtgcccgcgtgcacctggcgattccgaaaagctcggtgtttgtgcgtgatgagcgcaagccgagtgcctcggtgctggttgaactgtttgccggccgctccctggagccaggtcaggtgctggcgatcatcaacctggtggccaccagcgtgcccgaattgagcaagtcgcaaattaccgtggtcgaccagaagggcaacctgctgtccgatcaggccgagaactccgcgctgacccaggccggcaagcagttcgactacagccgtcgcatggaaagcatgctgacccagcgcgtgcataacatcctgcaaccggtattgggtaacgaccgctacaaggctgaagtgtccgccgatgtggatttcagcgccgtcgagtcgacctccgagcagttcaaccccgaccagcccgccctgcgcagcgagcagtcgaccagcgagcaacgcaccgccagcaatggcccgcaaggtgtgccgggggccttgagcaaccagccgccagcgcccgcctcggcgccgcaaaccaccggtggcgccgccgcgacggctggcgcgattcagcctggccagccgctgctggacgccaacggccagcagatcatggacccggccaccggccagccaatgctcgcgccatacccggcggacaaacgtaaccagtcgaccaagaacttcgagcttgaccgttccatcagccacaccaaacagcagcaaggcaaaatcaatcgcctgtcggtgtcggtggtggttgatgaccaggtcaaggtcaacccggctgacggcgccgtcacccgtgcgccgtggagcgccgacgaattggcgcgcttcactcgcctggtgcaggacgccgttggttttgacgccagccgtggcgacagcgtcagtgtgatcaacatgccgttctctgccgagcgcggcgaagtgatcgctgacccggcgttctacacgcagccgtggttctgggacatcgtcaaacaagtgctgggtgtgttgttcatcctggtgctggtgttcggcgtgctgcgcccggtgctcaacaacatcaccggtggcggcaagaaacagctggccctggccggtggcgacgtcgagttgggtggcatgggcggcctggacggcgaactggccaacgaccgcgtcagcctcggcggcccgcaaagcatcctgttgccaagcccgagcgaaggctatgacgctcagctgaacgcaatcaagagtctggtagcagaagacccgggccgtgtggctcaggtcgtgaaagagtggatcaacgcagatgagtgataatcgagccgccgttgccaagctcaccaaggtcgacaaagccgctgtattgctgctgtccctgggtgaaaccgacgccgcccaggtgctgcgccacatgggccccaaagaggttcagcgcgtgggcgtggccatggcgcaaatgcgcaatgtgcaccgcgagcaagtcgagcaggtgatgagcgagttcgtcgagatcgtcggcgaccagaccagcctgggtgtcggctccgacagctacatccgcaagatgctcacctcggcattgggcgaagacaaggccaacggcctgatcgaccgcattctgctgggcggcaacaccagcggcctcgacagcctgaaatggatggagccgcgtgccgtcgccgacgtaatccgttatgagcacccgcagatccaggccatcgtggtggcgtatctggacccggaccaggccggtgaagtgcttggccatttcgaccataaagtgcgcctggacatcatcctgcgcgtgtcgtcgctcaacaccgtgcagccggcggccctgaaagaactcaacacgattctggagaagcagttctccggcaactcgaatgcctcgcgcaccaccctgggcggcatcaagcgcgcggccgacatcatgaacttcctcgacagctcggtcgaaggccagttgatggactcgatccgcgagatcgacgacaccctgtccggccagatcgaagacctcatgttcgtgttcaacaacctctccgatgtcgacgaccgtggcatccaggcgttgctgcgcgaagtgtcctccgacgtgctggtgctggccctcaaaggctcggacgagaacgtcaaggagaagatcttcaagaacatgtccaagcgcgcctccgagctgttgcgcgacgacctcgaagccaaggggccggtgcgcgtcagcgacgtggaaaccgcccagaaggaaatcctcaccattgcccgccgtatggccgaagccggagaaatcgttctcggcgggaagggcggcgaagaaatgatctaaggcgcgtcccatgtcgaacaaagatgagacgcccagcgacctgattcgcgcgcgggatgtcggcgggttcgacatctggtcgttgcccagcttcgacccccatgtgccggagcctgagccggaaccggtgattgaaacaccggtggaaatggaagaggtgccgctggatgaagtccagccgctgacccttgaagaactcgaagccatccgccaagaggcctacaacgaaggcttcgcgaccggtgagaaagacggttttcgcagcaccaccctcaaggtccgccaggaagccgaggaggcgctgagcgtcaagctggccagcctggagcgcttgatgggcacgctgttcaacccgattgccgagcaggattcgcagatcgaaaaagccatggtcggcctggtcgagcacattgcccgccaggtgatccagcgcgaactggtgctcgattccagccatatcgaaagcgtgatgcgcgaagcgctcaagctgctgcccctgggcgtcggcaatgtgcggttgtacatcaatccgcaggatttcgaacaggtcaaagccctgcgcgagcgccatgaagaaacctggcgcattgtcgaagacgccaacctgcaacccggcggttgccgcgtcgaaaccgaacacagccgtatcgatgccacggtggaaacccgcatcagccagatcatggccaagctcttcgatcaacttcacgaacaggcgctgcaccccgccgagcctgacctgagcgttgacctggacgcccccgatgcgccttgaccgcaccagctttgccaagcgcttgggcggttatgccgaggccaccgaactgcccggccagccgatcctcgaagggcgcctgctgcgcatggtcggcctgaccctcgaagctgaaggcctgcgcgccgccatgggcagccgctgcctggtgatcaacgacgacagctaccacccggtgcaggttgaagccgaggtgatgggtttttccggcagcaagattttcctgatgcccgtgggcagcttggcgggcatcgcccccggcgcccgcgtggtgccgctggccgacaccggccgtctgccgatgggcatgagcatgctcgggcgtgtgctcgacggtgccggtcgcgcgctggatggcaagggcggcatgaaggctgaagactgggtgccgatggacggcccgaccatcaacccgctcaaccgcaaccccatcagcgtgccgctggacgtgggtattcgcagcatcaacggtttattgacggtcggccgcggccagcgtctgggcctgttcgccggtaccggcgtgggtaagtcggtattgctgggcatgatgacgcgcttcaccgaggccgacattatcgtggtcgggctgatcggtgagcggggccgtgaggtgaaggaattcatcgagcacagccttggcgaagagggcctcaagcgctccgttgttgttgcgtcgccagcggatgatgcgccgctgatgcgattgcgcgccgcgatgtattgcacgcgtatcgccgagtattttcgcgacaagggcaagaacgtgctgttgctgatggactcgctcacgcgtttcgcccaggcccagcgggaaatcgcactggccatcggcgagccgcccgcgaccaaaggctacccgccgtcggtgttcgccaagctgcccaagctggtggagcgcgccggtaatgccgaggcgggcgggggctcgattaccgcgttctacactgtgttgtccgaaggcgatgaccagcaggacccgattgccgactcggcgcggggcgtactcgacggccatatcgtgctgtcgcggcgtctggccgaagaggggcattacccggccatcgatatcgaagcgtcgatcagccgagtgatgcccgcggttgtcacgccggagcatatggcccgcgcccaacacttcaaacaattgtggtcgcgttatcagcagagccgtgacctgatcagcgtgggcgcttacgtggcaggcggtgaccgcgaaactgacttggcgattgccttgcaaccgcaactggtgacctacctgcgccaaggcctcaacgacaagatcagcatgggtgaaagcgaagcgcacctgggctcgatcttcgccccggcgccaggcggttaagccatggccagtacccgttcttctcgcctggcgcccgtggtggacatggccgaaaaggccgagaaaactgccgtgcaacgcttggggtattttcaggggcaagtccggctcgcggaaagcaagttgggcgaccttgagcgctttcgcggcgaataccagcagcagtggatcgagcgcggcagcaagggcgtctcgggccagtggctgatgggttatcagggctttctcaatcagctggaaaccgctgtcgggcaacagcgccagagcctggcctggcaccagaacaacctggataaagcccgcgaaagctggcaagcggcgttcgcccgggtcgagggtttgcgcaagctggtgcagcgttatatcgacgaagcgcgggcgattgaagacaagcgtgagcagaagctgctggatgagctgtcccagcgccttccccgccaatcccaatactaaaatgcgggagcaggcttgtgtgggagctggcttgcctgcgatagcggtacatcagctgctgatgagtccactgagccaccgctatcgcaggcaagccagctcccacatttgattctctgtgttgctcagatccggtacagctgctaaaccttgtctcatattgccaaagacaaggaagcagtcgcatgtcagtcgagtcagaagtatccctggacgggaagaagttgacgatcgcggtcaagggccggttcgatttcggtagccaccagacctttcgtgacgcctacgagcgtttctacaaagtccccgagcagtatgtggtcgacctcaaagacaccacctacatggacagctcggccctgggcatgctcctgttgttgcgcgaccacgccggtggtgatgagtctgaggtccgggtggtcaacagcaattccgatgtgcgcaagatcctcgccatctccaacttcgacaaactgttcgacatcagttgagcgccctggccccggtcctggaagcgctgacgatcctgatcgccgaagacagcgccgcggatttgctgttgctgtcgaccatcatccggcgccagggccatcaggtgctgaccgccaccaacggcgcgcaggcggtcgaggtgttcgctcgcgagcgcccgcaactggtgttgatggatgcgttgatgccggtgatggatggctttgaggcggcgcgccagatcaagcagctcgccggcgaagcgctggtgcctatcatctttctcacctccctgcgtgaaagcgaagccttggcccagtgcctggatgccggtggtgatgattttctgcccaagccctacaacccgctaatcctggccgcgaagatcaacgccatggaccgcctgcgtcgcctgcaagccacggtgttgcagcaacgtgacctgatcgccagacaccacgattacctgctgcacgagcagcgcgcggccaaggccgtgttcgacaaagtcgcgcactcgggctgcatcaacgccgcgccgaacatccgctacctgcaatcgccctacgcgctgttcaacggcgacttgctgctggcggcgtacacgccgtcgggcgacatgcatgtgctgctcggcgacttcaccggccacggcttgccggcggcagtgggcgccatgccgctggcggaagtgttctacggcatgactgccaagggctacggcctggcgcaaaccctgcgcgagatgaacgtcaagctcaagcgcatcctgccggtggacatgttctgttgcgccacgttgttgtgcctgagtgcccagcggcgcgtggtggaggtgtggaatggcggcatgcccgaaggctatgtgcatgaagtggccacgggcaagcgcacggccttggtgtcacggcatttgccgctgggcgtgctgtcggcacaagcgtttgatgacagtactgaagtctggccgatggcgctgggcgaccgggtgtttctgctctccgacggcgtgctcgacaccgccgacgccaatgaccagctgttcggcgccgaacgtttgcagcaggtcttcgccgccaatcacgagcccgaccggttgttcgacgatatcgaacgggccctggcggcgtttcggggcgaggcgcgggacgacgtgagcatggtggaaatcaccttgcaggccggccagtcgttgcgtgcggccgagccgatgtacgctgacagcggccagtcgtgcccgctggattggtcggtaagtttcgaattccgcgcgcagaccctcaagcgctacaacccgttgccgtatctgttgcagctgttgctggagatccatggcctgcgcgcccagagcggggcgttgtacagcgtgatggctgagctgtattccaacgcgctggagcatggcgtactgggcctggattcgcggctcaagcgtgatgcccgcgggtttgccgagtattatcgccaacgcaacgagcggctggcgcgattggacaagggttacgtgcgtgtgcatgtcgaggtggtgccgaccgacgccggcggcaagatgaccttgcgcatcgaagacagcgggcccgggtttgatgtggagcaagtgctggcacgcccgctggatgtcgaccgtctgtccggccggggtttgagcctggtgcgtcagttgagcagcgatgtacgctggtccgatggcgggcgcagtgtgtgcgtggagttttgctggggggctctggcataatccgccgattcttgatcaaggagcgagcaagtggccgagattcatctggaccccgacgtgttgtcgggtttgcaggaggtgatggagggcgagtatcccaagttgctggatacctttctcgatgactcgcaaaagcgtgtggaggcattgcgcaaggcacgtgatgatgccaaggcgctggggcggattgcccatagtttcaagggcagcagcggcaaccttggggcggtgcggttggcgcagttgtgtcagcggttggaggttgagtcggtgggcacggcggcggcggatcttggggcgttggtggatcagattgatcttgagtttgcgttggttcggccgatgtatgagtcggagcgggagcggtttcaggtttaggttttgttttgtgtacatatccgttgctgcggtaacggcggcttatggttccgcccttacggcgggtcacttttgaagagcgcaaagtaaccaaacgctcttgcccctacactcggcacctcgctcacgctcggtgtgccctcactccggcttgaatccgtgggccgccgcgatgggccatccctggcccatcgcggctagcccggcgtcctgccgggttgcccacggattcaagcctgcgttcggccagcgtgtttaacggggcgcctgagatcaagatcaaaagcaagagcacggcggcctgacagccggcctgagtggttggatcaaaggcgctgtttttgccaggctagatggcgttccttcagactaatgaatatccaactgtgggagcgggcttgcccgcgaatgcggtgggtcagtcagcatatttgtaactgatagaccgcattcgcgagcaagcccgctcccacaaagccagctcccacaccaactgcttttgatctacaccactcaggccggctgtcaggccgccgtgcttttgatcttgatctgaggcgccccgttaaaacacgctggccggaattcggcagggatttggggggtaaaccggcaggacgccggtttagccgcgacgcgccatggatggcgcgtcgcggcggccccccaaattcctgtcggattgcgggcacaccgagcgtgagcgaggtgccgagtgttggggcaagagcgttttgcttacttttgcgctcttcaaaagtgacccgccgtaagggcggaaccaatatcagcccccccacaaataccggatattcacccagaaacaaaaacctggcccaactcttgctctacctccaaatactgcatccccgatccccaatgcagtggagacccttacctatgccagtcgccccgaactcgcttcttcaggctgcccccgcggccaagcctcaagcgcctgccccgacccctgcggtggcggctgcggacccgcgtgacaaggccccgggcttcgcccaggtgttcgccagccagggcgcaaaaccgactgtcaaaaccgatgacactccggccaagcccacacgtgacaagtcgcctgacaccagcgccaagcctgcggccagcaacgacaagcctgccaccagcacgccagcggttgccgatagcggcaatcccttgcctgccacgccgccggccaagtccgacgacagtgccagcactgacgacgacaaaaccaccgacccggccgttgcgcagcaacccccaacggacccggtcgtcgacccggcggtgattgccgccgtcacgccggtggtcgttccggttcccgtgcaaacaccggcacctgccgcaaccaaccaggacgacaaggcccagcccgtcatcgcagcgcccgtcgcggccaccgaagacgccaagcagcctgccttcgacccgcaagccgacccgctggattcgatgcccgccgtgcgcctggcgatggagcagggcggtcacgtttcggccagcagccagacgccgcagaaagccgccccgaccaccacgcaggatcaaccgaccgctgcgcagaactttgccgccggcctggccaatatggtcgaccagcaagccaccaaagacagcactgacggcggtgacaaagccttcagcggtctgatcgacggcggcctcaaggatttgaaggacgccagcagcgatactcgggttgacgatttcgccaatcgcctggccgcgctgacccaggccgccacgccgaaaaccgcaaatgccttgccgccggtggccaacgcgccgctggcgatgcatcaaagtggctggaccgaggaggtggtcaaccgcgtgatgtacctctccagcgccaacctcaagtcggcggagatccagttgcagccggctgagctggggcgcctggatatcaaggtcaacatgacggcggaccagcaggcgcaggtgacgttcatgagcggccatgcagttgttcgcgaagcgttggaaactcaatccgggcgcctgcgtgagatgttcgcccagcagggcatggggcaggtggacgttaatgtgtccgaccagtcccgtggctggcaggggcaaggccaggagcaacagcagcagaaccaggcgcgcggtgtgagtggcggcgggcgtggggatagcggtgacgcgggtgatcatccggaggtggctgcggccgtcgcaccggtgatccagagcgtgattggttccagcgcggttgattactacgcctgacttgtgccaaacacaggtctaaatgtgggagcgggcttgctcgcgaatgcggaagttcagtcagcacatctgtgactgataggccgcattcgcgagcaagcccgctcccacatttgatttgtggtgtttcctctagtcccattaccagacaactctggcataacacttgctcttgcctttgcgtagatctatgaatcccagaatagtgacggattattggcatggcgaagagcgacgacgcagcaaaaccacctgcagccaagggcaagctcaagcttatcctgttgattgtgctgggcgtgctcctggccgtcggcgcctcgattggcggcacttggtacatcatgcacagcagcgccagcaaaccggcccccgccgccgaaaccgctactaacgtcaagcaaccggcaatcttcgagccgatgcttccggcctttgtcgccaacttcaaccagaacggccgtcaacgctacctgcaggtgagcatcaccttgctggcgcgtaaccaggcggacctggatgcgctcaaggtgcacatgccggtgatccgcaacaaccttgtgatgctgttctccggtcagagcttcgacagcctggccacgcccgtcggccaggaaatgctgcgtcagaaggtcactgccagcgtgcaggaagtggcccagaaagagcttggcaaagtcgtggtcgagcaggcgctcttcactaacttcgtattgcagtaggatcacgacatggccgtgcaagacctgctgtcccaggatgaaatcgacgcgctgctgcatggcgtcgacgatggtctggtacagaccgaaatggctgccgagcccggcagcgtcaaaagttatgacctgaccagccaggatcgcatcgtccgtggacgcatgccgacgctggagatgatcaacgaacgtttcgcccgctacacccgtatcagcatgttcaacatgctgcgccgctcggcggacgtggcggtgggcggcgtgcaggtgatgaagttcggtgaatacgtacactcgctgtacgtgcccaccagcctcaacctggtcaagatcaaaccgctgcgcggcactgcgttgttcatcctcgacgccaagctggtgttcaagctggtggacaacttcttcggcggcgacggccgtcacgccaagatcgaaggccgtgaattcacccccaccgaactgcgcgtggtgcgcatggtgctcgagcaagccttcatcgacttgaaggaagcctggcaggcgatcatggaagtcaatttcgagtacatcaactcggaagtgaacccggccatggccaacatcgtcggccccagcgaagccattgtggtctccaccttccacattgaactcgatggcggcggcggcgacctgcacgtgaccatgccgtattcgatgatcgaaccggtgcgcgagatgctcgacgccggcttccagtccgacctcgacgatcaggacgaacgctgggtcaaggccctgcgcgaagacctgctggacgtcgacgtgcctttaagcgccactgtggcccgtcgccagctgcgtttgcgcgatattttgcacatgcagccgggggatgtgatccccgtggaattgccggacgaactgatcatgcgcgccaacggtgtgccgtcgttcaaggtcaagctgggttcccacaaaggcaacctggcgttgcaagtgatcgaaccgatcaaccgccgctgatcactcttactttttgctgcaccgaggacatgtaatggctaccgaacacgaaaacacttccgccgaagaccaggccctggctgacgaatgggctgcggccctggaagaaaccggcgatgtaggccaggacgatatcgatgcgctgctcgccgccgacgctgctacctcgcccgccggcaaccgcctgccgatggaagaattcggcagcgtgccgaagaacaacgagccggtgacccttgatggcccgaacctggatgtgatcctcgacattccggtatcgatctccatggaagtgggcagcaccgaaatcaacatccgcaacctgctgcaactcaaccaggggtcggtgatcgagctggaccgcctggccggtgagccgctggacgtgctggtcaacggcacgctgatcgcccatggcgaggtggtggtggtcaacgagaagttcggcattcgcctgacggacgtgatcagcccgagcgaacgcatcaagaagttgcgctgagatgaagtattcgatggcgggactgtttctggcgctgccattgagcgccttggcggctgaaccggtggcccaggcggcagccgctgcgccggtggtcagcagtggcattggcggccagttgacccagttggtgctgggcttgctgctggtggtgggcctgattttcgtgctggcctggctgatgcgccgcgtgcagcgcatcgggccgggcaatggccaggtgattgagatggtcggttcgcgcgccctcggcccgcgtgatcggctggtgctggtgcaggtgggcgatgagcagattctgctcggcatcacgcccgggcgcatcacgccgttgcacgtgctcaagacgccggtggaggtagccaagaccgaggcggccacgcctgaattcgcccagcgcctgatggaattgctgggcaaggatcagaaggataaaaagtaatgcgcgttttgttgacgctcatgctgttgctggcggcgccgttggcgtttgcggccgacccgttgtcgatcccggcgattaccctgggcaccaacgcggccggggcgcaggaatattcggtcagcctgcagatcctgctgatcatgacggcgctgagctttattccggcgttcgtcatgctgatgaccagcttcacgcggatcatcattgtgttttcgatcctgcgtcaggccctgggcctgcagcagacgccgtcgaaccagatcctcaccggcatggccctgtttctgacgctgttcatcatggcgccggtgttcgacaaggtgaaccagcaagccctgcaaccgtatctggcggaaaagctcaccgcgcaggctgccgttgaaaaagcccagggcccgatcaaggatttcatgctgtcgcaaacccgctccagcgaccttgagctgttcatgcgcctgtccaagcgcaccgacattgccacgccggatcaggcgccgctgaccatcctcgtgcctgcgttcgtcacctcggaactgaaaaccgcattccagatcggcttcatgatcttcatcccgttcctgatcatcgacctggtggtggcgagcgtgctgatggcaatgggcatgatgatgctgtcgccgctgatcatttcgttgccgttcaagatcatgttgtttgtgctggtggacggctgggcgctgattatcggcaccttggccagcagtttcggcggggtgtagcgcgatgacgccagaagttgcggtcgacctgttccgtgaagcgctgtggctgaccaccatgatggtcgccgtgctggtggtgccgagcctgttggtgggcctgctggtggcgatgttccaggccgcgacccagatcaacgaacagaccttgagcttcctgccgcgcctgctggtgatgctgatcaccctgatcgtcgccggcccttggctggtgcaaactttcatggaatacatcctgcagctgtacggcagtattccgcagttgatcggctgaccggatgcagtccgtcctggccttgactgacacccagatcagcacctgggtggcgtctttcatcctgccgatgttccgcgtcacggctgtgctgatgaccatgccggtgtttggcaccaccctggttccgcgccgtatccgcctgtatttcgcctttgccatcactgtggtgattgtgcccgggttgccgccgatgccgccggtgaatgcactggacctgagtgccttgttgctgattgccgagcagattctgatcggtgcgctgatgggcttttcgctgacgctgtttttccaggcgttcgtgattgccgggcaaatcatttcgatccagatgggcatgggcttcgcgtccatggtcgaccccaccaacggcgtgtcggtggcggtgatcgggcagttcctgaccatgctggtgaccctgattttcctgtcgatgaacggccacttggtggtgttcgaggtcatgaccgaaagcttcaccaccctgccggtgggttcggggctggtggtcagccatttctgggaattggtggggcgcctgagctgggtgctgggcgcctcgctgttgctggtgttgccggcgatcaccgcgctgctggtggtcaacatcgcgtttggcgtgatgacccgcgcggcgccgcaactgaacatcttctcgattggtttccccctgacgctggtgttgggcatggggattttctggatcggcatggccgacattctcaatcagtatcaaccgctggcgaccgacgccttgcagtttttacgtgacttggcacgggcgcgttaagccatggccgagagcgagagtggccaggacaaaacagaagaccccacggagaaacgcaaaaaggactccagggaaaagggcgagattgcccgctccaaagaactcaataccctggcggtgatgctcgccggtgccggtggcctgctgatctacggcggcggcctggcgctggacctgatggagctgatgaagctcaacttctctttgccccgcgaagtattgctcagccctggcgcgatggggttgtaccttttgcattcgggcaaaatcgcgattctggcggtgcagccggtgctgatcaccttgctgctggcggcgttgatcgggccggtgtctctcggcggttggctgtttgcgccgggcagcatggcgcccaaattcagtcgcatgaaccccgggcccgggctcaagcgcatgttttccagcaaagcgttgattgagctgctcaaggcgctggccaaattcatcctgattctgtttgtggcgctgaccgtgttgtcgtccgacatcgacgacttgttgcgcatcgcccacgagccgctcgagtcggcgatcattcacagcgtgcagctggtgggttggagttcgttgtggatggcctgcgggctgatcatcattgccgccgtggacgcaccgatccagctgtgggaggcccacaaaaaactgctgatgaccaagcaggaagtgcgcgacgagcacaaggatcaggagggccggcctgaggtcaagcagcgcattcgccagctgcagcgcgaaatgtcccagcgcaagatgatggcggcggtgcccgacgccgacgtggtcatcaccaacccgacccactacgccgtggccctcaagtacgacccggagaagggcggcgcgccgatgctgctggccaagggcagtgacttcaccgcgctgaaaatccgcgaaatcgccgtggccaacgacatcctgttgctggagtcgccggagttggcacggtcgatcttctactccaccgacctcgaccaggaaatccctgccggcctgtacctcgccgtggcgcaggtattggcctatgtctatcaaatccgccaataccgcgcgggcaagggcaagcgcccggatccgctcaaggatctgccgattccgccggaattgcgccgcgacgcctgattgtctgcgtttgagctacgctcaggccaccagaattgacaccgttccattcgtctgaaaccccgccctgactgtcaatgttgacagtagccagcgccaccgcctcgcggttccatgacgccagacacctgcgcacacgtagtcaagagatgcagaggacagggccatggaagcagtgacaggcaccatcaaatcgtatgaccggacaaccggcgagggggtcattgtgttggataacgagtgtgagtctgtgcgtctcgacctcaagagttcggcgggtgtttggctgaaaaaaggccagcgtgtgcaatgcgccagaatccaccgccccaagggtgtttttgcgttccgcgtcaggctgatctaacgaattttcgaatgaaaaggcaggagggcagacatggcgaccggcacagtgaagtggttcaacgaggccaaggggtttgggtttattctccaggacggcggagggccagacgtttttgtgcactattcggcaatcaacgcccatggattcaaaaaactgagtgaagggcaaaaagtccaatttgaggtgactcaaggccaaaagggccctcaagccgagaacgtgcaaccttccccgtaatgatcgttcccaagctctcgcgcaggaacgcaccccgtgacgttctgcgtcacccttcctgaaccaaccccgaacccaatgtgggagctggcttgcctgcgatgcagacacctcggcctttcaggcacatcgagtagatgccatcgcaggcaagccagctcccacagatgaatcggttacccctcgacgatcgtcgccctgaaaccaaagttggaaggcttcttgcaataccgccttcaagacgcccctcggcgtcaaaactttgcttcaaggaacacgaggaataccggtggtagatcgctctcaaatgctcagcacggcccgtggcaccctgactgacctgtcgcggggcaacctgggtgtgccgttgttgttgctggtgatgctggcaatgatgatgttgccgatgccgccgttcctgctcgacgtgttcttcaccttcaacattgccctgtccgtcgttgtgctgctggtgtgcgtgtacgccctgcggcctctggatttcgcggtgtttccgaccattctgctggtggcgaccctgctgcggctggcgttgaacgtggcctcgacccgtgtggtgatgcttcatggtcaggacggccacgccgccgccggcaaggtgatccaggccttcggtgaagtggtgatcggcggtaactacgtggtcggtatcgtggtgtttgcgatcctgatgatcatcaacttcgtggtggtcaccaagggcgccgggcgtatttccgaggtgagcgcgcggtttaccctcgatgccatgcccggcaagcagatggccatcgacgccgacctcaatgccggcctgattgaccagaaccaggccaaggcccgccgcctggaagtcgcccaggaggccgagttctacggttcgatggacggtgccagcaaattcgtgcgcggcgatgccatcgccggcctgctgattctgttcatcaacctcatcggcggcatggcggtcggtatcttccagcacggcatgacctttggcgatgcgggcaaggtgtacgccttgctgaccatcggtgacggtttagtggcgcaattgccatcactgttgttatctacagcggcggccatcatggtgacccgtgcttcgggctccgaagatatgggcaagcagatcagccgccagatgttcgcctcgccaaaagcgctggctgtggcagcgggcatcatggcgatcatgggcatcgtacccggcatgccgcacgtgtcgttcctgagcatggcggccatggcggccggcgcggcgtacctgttctggcgcaagcaaaatgcggtgaaggtgttggcgcaacaagagatcgcccgccagcaggatttgctgccgtctccggcccgcgcccaggaaaccaaggagttgggctgggatgacgtgaccccgatcgacatgatcggcctggaagtgggctaccgcctgattccgctggtggaccgcaaccagggcggccaactgctcgcgcggatcaagggtgtgcgcaagaaactgtcgcaggatctgggtttcctgatgcccaccgtgcatatccgcgacaacctcgacctggcgcccagcgcctatcgcctgaccctgatgggcgtgatcctggccgaagccgagatctacccggaccgcgaactggcgatcaaccccggccaggtgttcggtacgcttaacggcattaccgccaaagatccggctttcggcctggaagcggtgtggatcgaagtcagccagcgcagccaggcgcagtccctcggttacaccgtggtcgacgccagcacggtggtcgccacccacctcaaccagattctgtacaagcactcccacgagctgatcggccacgaggaagtccagcaattgatgggtttgctggccaaggcctcgccaaaactggccgaagaactggtgccgggcgtgctgtcgctgtcgcaattgctcaaggtgttgcaagccttgctggccgagcaggtgcccgtgcgcgacatccgcagcattgccgaggccatcgccaacaatgccgccaagagtcaagatactgccgctctggtggctgcggtgcgtgtcggattgtcccgcgccatcgtgcaaagcattgtaggcgttgagtctgagctgcctgtgatcaccctggagccaaggttggaacaaatattgctcaacagtattcagaaggccgggcttggccaggaagagggcgttctgctggaaccaagcatggctgaaaaactgcagcgttcgttgatcgaagccgctcagcgtcaggaaatggcgggccacccggtgattctgctggtggcaggcccggttcgagcgatgttgtcgcggtttggtcgcctggcagttccgaatttgcacgttttggcttatcaggaaattcctgacaacaagcaagtgactatcgtcgcgacagtagggcccaacggctgaggtagtgggttatgcaagttaagcgttttttcgccgccgatatgcgtcaggccatgaaactggtacgtgatgagctgggcgccgatgccgcgattatcggaaaccgccgcattgccggcggtgtcgagctgacggctgccctggattacaccccccaggccctggcgccgcgcgtgccgaacatggagctcgaagacgagctgcgcaagaccgcttcgcgcattgtctcggcccaggctgagctgagcatgcggggtgacagcgatgccaccaccaatcgccaattgttcgccgggctgccgctgacggcgtccgagcctttggtcgagccgactttcaaagagccgccacgtcctgctgcgccagccccggccgctgcggttgaccagcgcgtgttcgattcgatgcgctttgaactcaacgggttgcgcgaattgctggaagtgcagcttggctcgctggcgtggacccagctgcaaggcagcaagcctgcacaagccaacctgtggcgccgcctgcaacggatcggcctgtccggcccattgtcccgcgacctgctggcgctcaccgccgaagttgaagagccgcgccaggcctggcgtatgctgctggctcacttggcgcgcatgatcgtcaccccggaaatcgaaccactggaagagggcggtgtaatcgccatggtcggccccgccggcatgggcaagaccaccaccctggccaagctggccgcccgttacgtactcaaatacggcgcgcagaatatctcgctggtgagcatggacagctaccgtatcggtgcccaggagcagctcaagaccctgggccgtatcctcaatgtgccggtgacccacgtcgacccgggccagtccctggccaatgccctcgacccgctgctgcgcaaacgcgtggtgctgatcgacaccgccggcctgcaagccagcgacccagccctgcgcatgcaactggaaagcctggccgggcgtggcatcaaatcaaagaattacctggtgcttgcaaccactagccagaaacaggttcttaccgctgcgtaccacagctacaagcgctgcggcctggccggttgcatcctgaccaagctcgacgaaaccgcgagcctgggtgaagtgttgagcctggcgatcagccatgaattaccggttgcttacctgactgacggcccgcggattccggatgatctgcatctgccgcgccgtcaccagttggtcagccgtgccgtcagtgtgcaaatgcaagaagagcctagcgaggaagcgatggctgacatgttcgcggacctttaccacaacccggcaaaacgggtcggttgagggcagtgaacaccgtgaaaagtatctacatcgatggtctgcaagcgattcacgcggccaagccatgtagcctgcgtctaagcaagacaaggtaaagaaataaaatgggcagcatgcatcccgtacaggtgatcgcggtgaccggcggcaaaggtggcgtcgggaaaactaacgtgtcagtgaatttgtccctggccctggcagagcttggccgtcgcgtcatgctgctggatgctgacctggggttggcgaacgtcgacgttttgctggggctgacacccaaacacaccctcgccgatgtgatcgaaggccgctgtgagctgcgcgatgtgctgctgcaggggccaggcggcattcgcatcgtgccggcggcctcgggcacccagagcatggtgcacctgagcccggcgcagcatgccggcctgattcaggcgttcagcgatatcggcgacaacctcgacgtgctggtgatcgacaccgccgccgggatcggcgagtccgtggtcagcttcgtgcgcgcggcgcaggaagtgttgctggttgtgtgcgatgaacccacctcgatcaccgacgcttacgccctgatcaaactgcttaaccgtgactacggcatgaaccgcttccgtgtgctggccaacatggcccaaagcccgcaggaagggcgcaacctgttcgccaagttgaccaaggtcacggatcgcttcctcgatgtcgccttacaatacgtcggcgcagttccgtatgacgagtgtgtgcgcaaggccgtgcaaaagcagcgtgcggtctatgaagcgttccctcgttcgaagtgcgcactggcgttcaaggccattgcccagaaggtcgatacctggccgttgcctgccaacccgcgggggcatctggagtttttcgtcgagcgtttggtgcatcagacgagcgcaggaccggtgctatgacatccagcggctacaacctttacaaaaagtcggcacgtgacagccagggcgaactgatcgagcgctatgcgcccctggtcaagcgcattgcctatcacttgctggcacgcctgccggccagtgtgcaggtggaagacctgatccaggccggcatgatcggcctgctcgaagtgtcgaccaaatacgacgcgagcaagggtgcgagtttcgagacgtatgcgggtatccgcatccgtggcgcgatgctcgatgaagtgcgtaaaggggattgggcgccgcgttcggtacaccgcaacacgcgaatggtcagcgacgcgattcgcgcaattgaagcaaaaaccggccgtgacgctaaagatcatgaagttgcggccgaactccaattgagtctcgacgattactacgggattttgaacgataccttgggcagccgcctgttcagtttcgacgacctgttgcaggacggcgaacacgaagggctgcacgaggacggcgcgagtgcacatctcgaaccgtcgcgcgacctggaagatgaacgtttccagggggcgttggcggaggcgattgccaatttgccggagcgtgagcgactggtgctggcgctgtactacgacgaagagctgaacctcaaggaaatcggtgaggtcctgggggtcagcgaatcgcgtgtcagccagctgcatagccagtgtgccgcccgcttgcggggacgattgggagagtggcgcgcgcgctgacaggcagtgtggggacactgcagacgctaccgcgaaggcttcatgttttcgcggatcagttccgtggtgccctgggcagtcctttttgtgtaacgcctgttgattgaaatggcgcgtccaggtgctgggcgcgtttaagactgcttggaggtcgaattggacaagaacatgaaaatcctcatcgttgatgacttctcaacgatgcggcggatcataaaaaacctgttgcgtgaccttgggttcaccaacacggtcgaggcggatgacggcattacggcgattccgatcctcaacagcgggagcatcgactttctggtaaccgactggaacatgccgggcatgaccggtatcgacctgctgcgccacgtgcgtgccgatgaaaaactgcgcagcctgcctgtgctgatggtgaccgctgaagccaagcgtgaacagatcattgaagccgcccaggccggggtcaacggttacgtggtcaagccgttcacggcgctggcactgaaagagaagatcgaaaaaatcttcgaacgcatcggtcattgatgctgccacgggggagctatggagcataacgaaacgtcacagggagactttgagtcgaccctgaaaaagcatgctcaccagttggttgaaagccttgaaaaaggccagttcggcgacgcggtgcagttgatccatgagctcaaccagacccgtgaccgcggcctgtatcaggaagtgggcaagctcacacgcgagctgcacagtgcgatcgtcaattttcagattgacccgcacatgccccaggccgaagagatttcgcaaatcaccgacgcgaccgaacgcctgtcctatgtggtcaggctgactgaagcggcggccaaccgcaccatggacctggtggaaaacgccacgccgctggtcaacggtatggccaacgaagcccaggccctgagtgttgactggggccgcttcatgcgtcgggaagtgggcgctgaagagtttcgtgagctggcgcgtcgggtcgacagttttctgtcgcgcagcgagcaggaaaaccgcacggtttccagcaacctcaacgacattctgctggcccaggattaccaggacctcaccggtcaggtgatcaagcgcgtgacccaactggtcaccgaagtggaaagcaatttgctcaaactggtgctcatggctggccaggtcgatcgttttgccggtatcgaacatgaccgcgcggcgatcctctcggaaaaagatccaaaaaaacatctcgccaagggtgaaggtccgcagattcatgccgataaacgtgaagacgttgtatccgggcaagacgacgtagacgatttgttgtccagtttaggcttctaaggagcacccacatgagcttcggcgccgatgaagaaatccttcaggatttccttgtagaggccggcgaaattttagagcagttgtccgagcaactggtcgagctggaaagccgaccggatgatgcgaacctgctcaatgcaatttttcgcggttttcacactgtaaaagggggcgccggcttcctccagctccatgagctggtggagtgctgccacatcgccgagaacgtgttcgacatcctgcgcaagggtgagcggcacgttgattcggaattgatggacgtgattctcgaagcactggatgcagtcaacggcatgttcagcgaagtgcgcgaacgtgccccgatcaccgcggctaccccggaactgctggccgccctggcgcgcctggcagaacccgccgacacctcagcgccggttgccgttgcagcccccgcgcctgtggtggaagccgagccggatgtgaccgacagcgagttcgaacagctgctcaactccctcagcgcggtcaaggccgaagctgaagcgccgcgtgcgccggttgctgcgccgaccagcgaagacattaccgacgcagaatttgaatccctgctcgaccagctgcatggcaaaggccagttcgcggctgacgccgtggcccctgccgcagccaccgaagcgcctgccgcttcggccaacaccgacattaccgacgacgaattcgaagcattgctcgaccaactgcacggcaaaggcacgtttgtggccgaagccttgccggaggttgcagccaccgccgccgcgccggcggccagccctgcacctgccggcgacgggctgatcaccgatcacgaattcgaagccctgctcgacgaattgcacggcaaaggcaagttcaccgaagtggccccggcggctgcggttgccacgccagcaccggtcgccgccaaagccgccgcgccagtggccgccaagccagccccggcacctgctgcggcccccgctgcggcgcgtgcagctgctgcaccggtggccgaaaaaccggccagtgaagccgaaaccaccgtgcgcgtggataccgcccgcctggacgacatcatgaacatggtcggcgaactggtgctggtgcgtaaccgcttggtgcgcctgggcctgaacagcggcgatgaagccatgcaaaaggctgtgtcgaacctcgatgtggtcaccgctgacctgcaaaccgcggtgatgaaaacccggatgcagccgatcaagaaagtcttcggccgcttcccgcgtctggttcgcgacctggcgcgccagctcaagaaagagatcaacctggaactggtgggtgaagaaaccgacctcgacaaaaacctggtcgaggccctggccgacccgctggtccacttggtgcgcaacgccgtcgaccacggcgtggaaaccccggaagaacgcgaagccgcgggcaagtcccgcaacggcaaggtgattctggcggccgagcaagaaggcgaccatatcctgctgtcgattaccgatgacggcaaaggcatggacccgacgattttgcgcaatatcgcggtcaagcgtggcgtgatggacaaggacgccgccgaccgcctgaccgacaccgagtgctacaacctgatcttcgccccgggcttctcgaccaagaccgagatttccgacgtgtccggccgtggcgtcggcatggacgtggtaaagaccaagatcagccagctcaacggctcgatcaatatctactcgaccaagggccagggctccaagatcgtgatcaaggtgccgttgaccctggcgatcatgccgaccctgatggtgatgctgggcaaccaggcattcgccttcccgctggtcaacgtcaacgagattttccacctcgacctgtcgcgcaccaacgtggtggacggccaggaagtggtgatcgtgcgcgacaaggcgttgccactgttctacctcaagcgctggctggtggcatcggccaagcatgaagagcagcgcgaaggccatgtggtgattctttccgtgggcacccagcgtatcggctttgtggtcgatcaactggtgggccaggaagaagtggtcatcaagcctttgggcaaaatgctgcagggaaccccgggcatgtcgggtgcgaccatcaccggtgacggccggatcgcgctgattctcgacgtcccgagcatgctcaagcgttacgccgctcggcgtatttgattctggtggggcttcggcggtattgcccgccccgcctaacggagtgtttatggcagtcaaggtcctggtggtggacgattcaggtttcttccgccgccgcgtctcggaaattctttccgccgacccaacgattcaggtggtcggcacggccaccaacggcaaagaggcgattgatcaagccattgcgttgaagcctgacgtgatcaccatggactacgagatgccgatgatggatggcatcacggccgtgcggcacatcatgcagcgctgtccgactccggtgttgatgttctcctcgctgacccatgaaggcgcccgggtgaccctggatgcgctggacgcgggtgcggtggacttcctgccgaagaatttcgaagacatctcgcgcaaccccgagaaggtcaagcagatgctgtgcgagaaggtgcacagcatttcgcgcagtaaccgtcgcagcctgttcagcacaccggcgccagcgcccgtcgcggcgccggcaccgaccacgtcgtcgtttgcgcgcccggcacctgcaccggtggcccgccctgcggtggcgccggttcgcgcgccagcgccgagcggccattcccccgcgcccaaacgcaaagcctacaaactggtggctatcggtacttccaccggcggcccggtggccctgcaacgcgtgctgacccaattgccggccaactttcctgcgcccatcgtcttggtgcagcacatgcctgccgcgttcaccaaggctttcgccgagcggctggacaagctgtgccgcatcagcgtcaaagaggccgaggacggcgacatcctgcgccctggcctggcgttgctggccccgggtggcaagcagatgatggtggacggccgtggggcgatcaaaatcctgcccggcgacgagcgcctgaactacaagccgtgcgtggatatcaccttcggttcggccgccaagtcctacggtgacaaagttctggcggtggtgctcaccggcatgggcgccgatggccgtgaaggcgcgcgcctgcttaagcagggcggcagcgcgatctgggcccaggacgaagccagctgtgtgatctatggcatgcccatggccatcgtcaaggctgacctggccgacgccgtgtacagcctggacgatatcggcaaacatctggtggaggcctgcctctgatggatgtattgagcctgatcggcatcatcatggcgtttgtcgcgatcattggcggcaactacctcgaaggcggccacctcggtgcgctggccaacggcccggcagcgctgatcgtaatcggcggcaccgtgggcgctgcgctgttgcagtcgcccttgagctcgttcaagcgcgccatgcagattctggtgtggatcattttcccgccgcgcgtggatttgcccggcggcatcgaccgcgtggtcaactggagcctcaccgcgcgcaaggaaggcctgctgggcctggaaggcgtggccgatgccgaacccgacagctacgcgcgcaaaggcctgcagttgctggtggacggcgcggagccggaagcgattcgcagcattctggaagtggatttctacacccaggaaagccgcgacatcaacgccgccaaagtctttgaaagcatgggcggctatgcgccgaccatcggcatcatcggtgcggtgatgggtttgatccacgtgatgggcaacctcggcgacccgtcgcagttgggcagcggcattgccgtggccttcgtcgcgacgatctacggcgtggccagtgccaacctgctgctgttgccggtggccagcaagttgaagtcgattgcgatgcgccagtcgcgttaccgcgagatgctgctcgaaggcattttgtcgattgccgagggtgagaacccgcgctccatcgaattgaagcttcagggcttcatggattgatgggaggtatttgctgtgagccgtcgccgtcgcgagcctgaagaacacgtcaaccacgagcgctggctggtgtcctacgcggacttcatcacgttgctgttcgcgtttttcgtggtgatgtactccatctcgtcgatcaacgaaggcaagtacaagatcatttcccaagcgttggtgggcgtgttcaacgataccgaccgcgcgctcaagcccatccccatcggtgacgagcggcccaagaccgtgaccccggccaagccgctggtcaacgacagcgacgaaaccgccgctggcatcggtggcaccagcgacccgctgaaaagcatcgccgatgacatcagcgccgcgtttggtgacctgatcaagtccaaccagatgaccgtgcgcggcaatgagctgtgggtggagatcgagttgaactccagcctgctgttcgccagtgccgatgcgatgccgagcgatcaggcgttcaccatcatcgacaaggtggcggcgatcctcaaaccgtttgaaaacccggtgcacgtagaaggctttaccgacaatttcccgatcagtaccgcgcagtacccgaccaactgggaattgtcttcggcgcgtgccgcgagcattgtgcgcatgcttgccatgcagggcgtaaaccccgggcgcctggcgtcggtgggctatggtgaattccagccggtggccaataacgccaccgctgagggccgcgcgcgcaaccgtcgcgtggtgctggtggtctcgcgtaacctggatgtacgccgcagcctgaccggcaccggcacagccaatgcaacgccggatgcggcgttgaagcgggctggcacacaaactgcaccgccaaccgttaagccgtcggttcgtcagagtgccgtcaattctccgtcaccggctcaataacttatgcactgtctcggtcgcgccaatgcctgccgggaggaaccaaccgaatgagagtctgggcagttgccaatcaaaaaggtggggtcggcaagaccaccacgtccatcgccctggccgggttgctggccgaggcgggcaagcgcgtggtcgtggtcgacctggacccccacggctccatgaccagctatttcggttacgacccggatgcgctggaacacagctgctacgacctgttcctgcacaagggcagcgtgccggcggatttgccggggcaactgctgctgcccaccagcaacgaaagcatttccctgctgccatcgagcaccgcgctggcgacccttgagcgccagtcgccggggcaaagcggcctgggcctggtgattgccaaaaccctcgcgcagctgtggcaggacttcgactacgcgatcatcgacagcccgccgttgctgggtgtgctgatggtcaacgccttggcggccagccagcaactggtgatcccggtgcagaccgagcacctggcggtcaaaggcctggagcgcatggtcagtaccctggcgatgatcaaccgttcgcgcaaacaggcgctgccgttcagcatcgtgccgacgttgttcgaccgccgtacccaggcgtccctcggcaccttgcgtgtactgcgcgatgcctacccggacactatctggaatggctacatcccggtggacacccgcctgcgtgatgccagccgcgcgggcctcacgccgtcgcagttcgacggcaagagccgtggcgtgctggcctaccgcgcgttgctcaagcatctgctctcgcagcagcttgtggcgcaggtggcgtgatggtccgtcccgtcgaattaaagacccggccgcaactggcgcttgaatcctacctggataacttgctgcaggatgcgacggcagaagaattgccggaaccggttctggtgctggaacctgcggtagtgcccgaaagcacgctggatgaatttcagctggctgtattggaagagcaggcccgtgacgcacacgtcgtggcggcccctgttgtggtgccgattacgccggtgatcgtggcgccattggtggttgaacccgtggtgcaagtgcacctgccgccgagcatcacgccgccgcccgtcacgggggatggtcgcccgtcgtgggccgctgagccgttcgaatgcctgttgttcgacgttgccgggctgaccctggcggtgccgctggtgtgcctgggctcgatctattcgctggaaggccaggaactgacgcccctgttcggacagccggagtggtttctcggcatcctgccgagccaggccggcaacctcaaagtccttgataccgcacgttgggtgatgcccgaccgctaccgcgacgacttccgccagggtttgcaatacgtgatctcggtacagggttatgagtgggggctggccgtgcatcaagtcagccgctcgttgcgcctggacccgaatgaaatcaaatggcgcagccaccggggccagcggccctggctggcgggcaccgtgatcgaacatatgtgcgcgttgctggacgtcgccgaactggccgagttgattgccagtggcgccgtcaagacgatggcaccgaacaaacgcagttgattgaacaataagggccgtgcgcgagcgtggccagagcagaacacacgccgtgagcatcggcatttgaaggggtcaaagagatgaacaagtcagcatccgcacaaggtttggtcgatgatccaatcctgcaatgggtaaccttcaaactggacaacgagtcctacggcatcaacgtgatgcgcgtgcaggaagtgctgcgctacaccgaaatcgccccggttccgggtgcaccaagctacgtgctgggcatcatcaacctgcgcggcaacgtggtgacggtgatcgacactcgccagcgtttcggcctggcgccgacggaagtcaacgacaacacccgtatcgtgatcatcgaagccgacaagcaagtggtcgggatcatggtcgacagcgtggccgaagtggtttacctgcgccaatcggaagtggaaaccgcgccgaacgtgggtaacgaagaatccgccaagtttatccagggcgtgtgcaacaagaacggcgagctgctgattctggttgagctggacaagatgatgagcgaagaagaatggtcggaactggagagcatctgattgttccttgaggcggcggtgatcgtcctggccctgttgtgggccgggaccctggcgttcctgctgcgctacatgcgccagcaacgtgaactgttgttgcagcaggctgaacgtgatgcggtgcgtgaccggcggattctggatctggtcaagcgggtggatcactttcagcagagtgcggtgaaagtgggtgatgaggtgcacgaactgcgcgcgattcttgggcctttgccggacaagctggcgcagttggagcagcgggatccttcgagtttgtcgtttgcccaggcggccaaattggtcgggatgggggctacggtggatgagcttactcagtcttgtgggttgactcaggctgaggcgcagttgatgagtaagttgcacaaggggtgattgtgtagatatccgttgctgcggtaacggcggctattggttccgcccttacggcgggtcactttgaaaagcgcaaagtaaccaaacgctcttgcccctacactcggtgcctcgcccaggctcggcatgcccgaacgaaggcttgaatccgtgggccgccgccatgggccatccctggcccatcgcggctaacccggcgtcctgccgggttacccacggattcaagcctgcgttcggccatcgtgtttaacggggcgcccaagatcaaaagcaagagcacggcggcctgacaaccggcctgagtggttgaagcaaaagcgctgtttttgccagagcagattgcgttccttcagacaaatgaatatccaactgtgggagctggcttgcctgcgatggcatcaactgggtgtaactgaaagaccgaggtgcctgtatcgcaggcaagccagctcccacacaaaccgcgtttgcttcacaccacttaggccggctgtcaggccgccgtgcttttgcttttgatcttgatcttgatctgaggcgccccgttaaaacacgctggccggaattcgacagggatttggggggtaaaccggcaggacgccggtttagccgcgacgcgccatggatggcgcgtggcggcggccccccaaatccctgtcggattacgggcacaccgagcgtgagcgaggtgccgagtgttggggcaagagcgtttggttactttgcgcttttcaaagtgacccgccgtaagggcggaacccatctcagccgttacccaaaaaatggatatgtactcagtaaaccaaaccccctccccaaaggtcccatcctccaagtacctttgaatcaggagattccccaatgaccacccccaaagccctgttgatcctccacggcaagcaagccctcaacgaggacgtgcgcaccgccgtgcaggcccggcgtgaacaggggtgggatctcgcggtccgggtcacttgggaaggtggcgacgcccagcggctggtcaacgaagccttggccgacggctacacccacctcatcgccggcggcggcgacggcaccctgcgcgacgtggccgaagccatggccctggctaaaaccgacgccagcctggtgctgatgcccctgggcaccgccaacgatttcgccaaggcggccggtgtaccgcagcagcccgctgaggcactggcgctgctcgacgtcgagccccgagccattgacctcggccaggccggcagccagatgttcctcaatatggccaccggcggcttcggcagccaggtcaccgccaacacctccgaagacttgaaaaaagtactgggcggcgccgcctacctgttcactggcctgacccgtttcagcgagttgaaagccgcctacggcgaactggaaggcccgggtttccactggaaaggcgacctgctggcgctgggcatcggcaacggccgccaagcgggcggtgggcatgtgttgtgccccggcgcattggccgacgacggcctgctcgatatcagcatcctgccggcgcctcaggaggtggtcggtacactaatgaccctgatgagcgacggctggggcctggacaacatgttcgtgcgggcgcgcctgccgtgggtggagatcaaggtcgccgaagggctctacatcaacctggatggcgagccgctcaaaggcgacgacttgcgtttcagcgcagtgcccaaggccttgcgcgtgcacctgccggtcaattcgccgctagtcgtccaggctgatgatctgctcgcgaaccgcgaataacaccaggccggccacatcgaatatctgcaggcgcttcatgatttgcgagcgatgcgcttccaccgtcttgatgctcaggcccaggccatgggcgatttcccgggtggacttgccacgcacgatcaagcgcagtatttccaactggcgcgccgtgaggttgtggctctgggcgacaggggacgccgggccctggctgcggatcaatgcctggttgatcaccgtatgggcgatggcggggctcaggtagcgctcgttgttgcgcaacgccagcagcgcgtgttccagctcgttggccgtggtgtccttgagcaggtagccatgggcaccggactccagcgcgcgcatgatcagttccgggtcggtgtgcatcgacaggatcagcactctgctcttggggtaggccgccttgagttgctgcaaggcgtcgaggccgccggtgtgtttcatcgacaggtccagcagcacgatatccggttgcaggctgctgaatttctccagtagctgcgcaccatcgctggcttcgccgattacgttgtagcccgcaatatcctggatcagtgcgcgtacaccggcccggatcaatgcgtggtcatccaccaggagtaatttgcagatcactcgagaaccttaggggaactggcccgttcgagggcgcggggcgcccaggggaaaagcgcgtcgatccgtgtgcctttgcctggctggctgctgacggacaatgaaccgcccagctgatcgatgcgctcggacatcccggccatgccccgctggccttccaggcccgggttgatggcgggcgaaaagcccaggccgtcatcgcagatcaacagcgacaggccttcgggcaggcgttgcaggcgtaccagcaaattgtgcgcctgggcatggcgaagcatgttggtcacagcttcctgggtgatgcgaaaggccgctacggccatttcttccgggatgccggtcagccgttgctggcattccaggctccagtggacgggggtgttttccagggtcttgagcaggtgcgcgcgcaagctcgcctccaggcccaggctggccaactgccgggggttgaggatggcggacacgtcacgcactttggccagggtttcattgagggtgttgcacaacactgtgcactggctttgcaggtcgtcgggcaagcggcgcttgagccattcactttgcaatttggcggcggtcagcagttggccgatgtcgtcatgcaactcgcggctgaggcggtgacgttcgttttcctggacttgcagcaggcggtccgccagctcttgcggctggaatttgatcgacttgcgggagctccactgttgcaggcccaccaccagcaatgtagccaggttgagcagcaggatcaagagtggtaatggcgcggaacaggtataggcccacaggctgaccagcaacgagcaaaggcacaggacgagaaccatgcggcgcgcattgcggcgcgacacggaccttgcgatgagtgacttgaggctggcgtacatagcggatggagccactgaaggttcgctgcgggaagaccgctcaatggggcgggcaggtctttgtttggaatcgtttttatacatgatgaagttgagtcacttcgagcggggcatagtaccaccactattaccgttggtcgcctaacgcttttcctggaaagcttattaagcaggcatacgccctgggcggtaatcccagcgctaaaagagtcggcagttgtattaatcgacttggcttgtatcactattgcgttgatggctaattgatatgttttgcccgcaaacagataccagccctttagtaggaacggtcgcttttagataagtcagcgattaaatacgaccttatcaatacgtcacgatgcgtggtgcatgcgctgctgcggtttattggcgaagtctttttgcgggatctgcaaagtaaccgtcgcaatcaatgtagtttgctcgctttcatccaggcccaactcaccggtccgggtgtcgatcagttccagttgccaggccaacagggtcaggcagtcatgcaaggcatccagcgcctggtcatgcagatgcatggggcttacggcgttggcaatcaggtattgaatatggcgcgagaactcgctgatcgcctgcagggccaggccttcggccttttcggccagtttggccaggctggccttcatgcagtcgattgcatcgctgtcgttgcgaatcaaatgcaggtggttcaggcactcttccgatttggccaaaagcatttcagcttccagcaggaattcaggaagtgcggtttgccattcgtttgcgctgctcatcctgcaagtctccgcaacataaggtcgggtgatgaagtgccgcatcgggtgaatggcgtaaaactaccgctgaaatatgactgaaatctgtagcccacttccgaaaaatcagcaggacctttatttgaatgatggcgagtgccatgtgcggccctcgttataaggggcttttgcataacttcaattgccgccacgcgactgtctgtaagacgcgtgggccgagggcttgggatggcaaacaaaagcctgactccattcatgcaatgagaatggcgtcacattaatggctattagatatcgcgaatatcaggttgggcctgattgttcgtaggggaatcccttacgcagcggaacctcgcgtcgatttacatgtcgcgcggcgttgctggagggccttgtgtggaggcgattgcagtaaagcatgatgtcagtgtgacatcaatgcatttacgtggcattttaccggggtcaaggtctggcgctcgccgccgataacaagccttaagtgagcagcacaatcccacatcaggagcttttaatggccggcattctcgacacggtagatcaacgcacgcaactggtgggtgagaatcgcctggagatcctcatgtttcgcctggccgggcgccaattgttcgcgatcaacgtgttcaaagtgcaggaagtgctacagctgcccaagctgaccctgatgccccagcgccacccgtttgtgtgcggcgtggtcaacctgcgcggccagaccctgcccgtgatcgacctgtcacaagccatcggcatgcgcccgctggtgccggggcctaacagcacgattatcgttaccgagtacaatcgttcggtgcaggcctttctggtgggcggcgtggaccgcatcgtcaacatgaactgggaagccatcctgccgccgcccgccagcgccgggcgccagcattacctcacggccatcagcaaggtcgatgaccagttggtggaaatcatcgacgtggaaaaagtcctcgccgaaatcgtcccgtacaacgccaaggtatcccgcgaaaaactcgaagacccggtgctggaacgtgcccgtggccgcgaagtgctgttggtggacgactccaacgtcgccctgtcgcaactgcgcgatacccttggccaactcggcgtgaagatgcatatcgccagcgatggccttaaggcgctgaacatgctcaaggcttgggccgacagcggccaggtgatgaccgacaagctgctgatgatcttcaccgacgccgaaatgcccgaaatggacggctaccgtctgaccaccgaaatccgcaatgacccgcgcctgcgtggcctctacgtggtgctgcatacctcgctgtcgggcagcttcaacgattcgatggtgaagaaggtcgggtgcgacaacttcttgtccaaattccagcccgacaaactggtggatgtggtgcgccaacgtctgatgttggacgaagtgcccgcctgactttaggatgacactttgtttcccaggaaggcaggcccatgcttcgtctcagcgcgttgtaccgttaccccttgaagtccggcaaggccgaggttttgcagcatatcggcctggatacactcgggctggatggggatcgacgctggatgctggtggacgaagccagcgggcgcttcctcacccagcgtgcagtggcgaaaatgagccaactgtcggcactgtggaatggcgctggcggcctgaccctgagctccccgggccatgcgccgctggacgtggcactgcccggcggcgacgccgagctgcgcggcgtgactatatggcgtgacacgctgcgcgtgccggatgctggcgatgccgccgcagcctgggtcagcgcgtttatcggcaagccgacgcgcctggtgcaagtgccggtggagcgtgcgcgcagcaccgaagccggctatggcaaggatgacgacaaagtcggttttgccgacggtttccctctgttgctgattggccaggcctccctggacgacttgtcccggcgcatcggccgccccatggaaatgctgcgttttcgtcccaacctggtgatcgaaggcagcgaggcgtttgccgaagatggctggaagcgcctgcgcatcggcgacgtggagttgcgcgtggtcaagtcctgttcccgctgcatcctcaccaccatcgacccggccagcggtgaacgcagtgccgaccgtgagcccttggccacgctcaagacgttccgcgagcaggacggcgatgtgatgttcggccagaacctggtcaacgatggcacaggccgcctggaagtcggcatgccggtgacgattctcgaataaggctttcgaataaaatcagcgcccataaaaaatgcccgtctcgcaggagacgggcatttttttgaccgggtgaaagatcagccgcggtattcgcacaggtaagcggtatccacggcgaccttcagctggaacttgctgttggccggtacgttgaactggctgccggcggcgaaggtttcccagtcgttggcatccggcagtttcacggtcagggcgccggacaccacgtgcatgatttcacgctgggcggtgccgaattcgtattcacccggggccatcacacccaccgtcgctggaccttctgcggtgccaaaagcgatcgacttgacggtgccgtcgaagtactcgttgactttaaacatgggtgaatcctcggaaaagggtctggaaaagtcggccagtatgcccaacggcacggaggctgcctagaccggcagtatcagcggtaacaaccgtgcggtattgcgtgcatcttccagtgcccggtgttgctggccatgaaactgcatcccggccaattgcagggcgccattgagccccaagggtttgtccaggcgccgcgccttggcgaagcgctgcttgaggttcacatggggcgtctgggcgagggcgctggtcaggccgtggcgttgccattccagctccagctgcgcgcggtcatagtcgccccagctggcccagccttccaggcgcgcctgatgctggcccagccagcgctcgaatagcggccacacgtcggtgatcggtgcggcggcgtcgatgctggcctgggtgatgtgcgtcagctgacggcagaacggcgtcagcaacgggcggcgcaggggccgcacgaaacgctggaaatgatccagctcgcggccctggcggttcaccaggctggcgccgatctcgatgacttccatctccgtcacgggccagccgccttcatccgttgtggcttcaaggtcaataatcagccaatgaggcattgcgcaggttcccgtactcatcccttcctgatggggatagagcgtagcccggccttgtagttccgcctagggcctattcgatctccagcaaaacctgacggttacgtacctgatcgccggcgatgacctgcacgcccttgaccacgccatccatgccggcggtcaacgaatgctccattttcatggcttcgagcaccagcagcagttggcctttgaccacggtttcacccgcactgacgcgcacgtcgacgatggcaccgtccatcggcgccttgaccgtgccgctgccggcggcgacctggcggctggcgacctgctgggtgcggttggacacgtgcaggcccggcagccatagctcagtgccgtcgagggagtagggcaggcgccgacggatgccgttgagagtcagggtgacatggcggccgtcgagggtgagttgcaggggagcggcgctgacggtgtgggtttcaccgttgacctccaggcggtatatcgaagggctggccgtgttgttgctccaccccgccaggccttgcggatgcttgccagcactgtgttgataaaacagtgcggcagccagggtgagctgatcttctgaggccgcctgaggcgggatttcgctgaaatgctcggcaataaacccggtgctgaaatcgcccgcgacaaagtccggttgcgcgagcagcgcggcgagcagtcgctgattggtggtcacgcccagcaataccgtgtcctccaccgcccgcagcagtttgcgcagggcctcttcgcgggtggcgccgtgggcgatgatcttgccgagcatcgggtcgtagaacgggctgatgcgctggccttcgctgatgccgtgatccatccgaacaccgggggctggttcccagcgcactacgtcgccggtttgcggcaggaagccctgggccgggtcttcggcgtacaggcgcacttccatggcgtggccggtcaacgtcacgtcggtttgctgcaagggcaacggctggccggcggcgatgtgcagttgccaggccaccaggtcgaggccggtgatcagctcggtgaccgggtgttcaacttgcaggcgggtgttcatttccaggaaatagaactggccgttgcggtcgagcaggaactccacagtaccggcgccgacgtagttcaccgcccgcccggccttgagcgccgcctcacccatggcgtggcgcagctcgggcgtcatcacggggcagggcgcttcctcgatgactttctggtggcggcgctggatcgagcagtcgcgttcaccgaggtaaagcaggttgccgtggctgtcgccgaacagctggatttcgacgtggcgcgggtctatcagggcctgctcgaggatcagttcatcgctgccaaaggcgttttttgcttcggaacgggcggtgtgaaggttggccagcaagtcttttgcctgatgcaccaggcgcatgccacggcccccgccaccggcgctggccttgatcatcagggggtagccgatgcgctcggcttcccgttgcagggtttggtcgtcctgggcgctgccctggtagccggcgatgcaggggacgccggcgtcgagcatggcgagtttggacaggcgtttgctgcccatcaattcgatggcctcggggctggggccgatgaacgtcagcccggcattcaggcaggcgcgggcgaagtcagggttttcggagagaaagccgtagcccgggtgaaccgcatccgcgccggttattgtggcggcgtggaggatggcatcgatgttgaggtatgactgctggacgggcgcggggccgatgttgacggcttcgtcggccatctgcacatgcagggcctgggcgtcggcgtcgctgtagatggccacggtgcgatagcccaaggcttgggcggtgcgctgtatgcggcaggcgatttcgccgcggttggcgatcaggattttgctgagtgtgggcatggggttatccctgattaatcgggtgtcagttcgggcctcatcgcaggcaagccagctcccacaggtggaacgcattccgaaaggtgggagctggcttgcctgcgatggcgtcatcgggaccaacccggcttccgtttctgtacaaaagcctgcgtcccctcaaccccttcttcacctttcaccgcctcggcaaaccactgcgcgcctcgatccagtacggtttcaagcggctcatccacactcgccaacaacagcgctttggttcgcgcattcgcccctggcgcgcacttcagcacttgccccaacacgtcatccaaccgctcagccaacgcctgcggatcgcgctcggtaaagtgcacgacccccagccgctcagcttccacgccatcaaagcgcgccgccgtcagcgcgagcctgcgtgcctgggtcagcccgatgcgtttcaccacaaagggcgcaatctgcgcgggcaataaaccaaggccggtctctggcaacccgaactgcgcctgatggtcggcaatcgcaatatcactcacgcacgccaggccaaacccgccccccagcaccgcgccttgcagcaccacgatgaccacttgcggcaccgcttcaacttcttgaagcagagtaccgaacgcccggttcaacgcctgcatgcggtcgcccgcgctggccatgtctttcacgtccgcgccagcacagaagtgcccgcccgcgccgctgatcaccagcgcgcgcgtacggctatcgagatctgccagcacggcgcgcagttcgtcgaccatttcctggctcatggcgttgcggctttcggggcggttgagggtgatgtgcagcaccccgttatgcggttcaagcagcagggtgttcatggctttttcccgggcaaggtgcccatcagtttgcagatgatgcccagcatgatttcgtcggcgccgccgccaatcgacaccaggcgcacgtcgcggtaggcgcgggccaccgggttgtcccacatgaagcccatgccgccccagtattgcaggcaactgtcgctgacctcacgtcccaaacgcccggccttgagcttggccatcgacgccaggcgggtcacgtcctggcccttgatgtattgctcggtggcctggtagaccagcgcgcgcaggcactcgatttccgtggccagttcggccaggcgaaagtggatgacctggttgtcgatcaaggctttgccgaacgtctggcgctccttgcaatactcgatggtgctgtcgatgcagtactccaggcctttgatcatattggccgcgccaaacaggcgttcttcctggaattgcagcatctgcatcatgaagcctgcgccttcgtggccgatgcggttgcgttgcggcacacgcacgccgtcgaaaaacacctgggcggtttcggaactgtgcatgccgagtttttccagggccgggctgacgctgatgccgggcgtgttcataggcaccatgatcaaggatttgttgacgtgcggcttgtcgtcggaggtgttggccagcaggcagatgaagtcggcgctgggcgagttggtgatccacatcttgctgccgttgatcacgtagtcgtcgccgtccttgcgcgcgtgggttttcagcccggccacgtcggaaccggcgccggtttccgagacgccgatgcaacccacttgttcgccgctgatggccgggcgcaggaattcgtcgcgcagttcatcggaaccgaagcgggcgagggcgggggtgcacatgtcagtctgcacgccgatggacatagggatgccgccgcagcggatggtgccaaactcttcggcggcgacgatggagtagctgtagtccaggcccatgccgccaaattgctcaggcttggaaatgcccagcaggccgaggtcgccggccttgcgaaaaatctcgtggatgggaaagcgcccggccttttcccatgcgtccacatgcgggttgatctcgcggtcgacgaaggcacgcacggtgcggcgcagttcctggtgttcctgggtgaagatcatttttagtgttctccttaaagacgcgctacgccgaagctgttcggctgtaatggccgcacgtcggcctcgtggcagatgtccaacagaaatcccagcaatgtgcgcgtatcccgtgggtcaatcagcccgtcatcccagaggttcgcgctggcgtagagcgccgtggcctggctgtcgagtttctgcgcggtgacctgttcgagcatgtccagcaccttggggtccggcaccagaccgtccttcaactgcttggcctcggtgacaatgcgcagcactttgcctgcctgcgcaccgcccatcaccgccgtgcggctgttgggccaggcgaagataaagcgcgggtcgaggccccggccgcacattgcgtagttgcctgcaccgtaggagccgccgaccactatcgtgagtttaggcactcgcgcattggccaccgcctggatcatcttggcgccgtgcttgatcacgccttgctgttccgactcggtgccgaccataaaaccggtggtgttgtgcaaaaacagcagcggcgtgcggctttggtcgcacagctggataaactgcgcggccttgctcgcacccttgggcgtgatcgggccgttgttgccgatcacgccgacggcgcggccctgaatgtgcaggtggccgcacacggtgtgggcatcgaactcgcctttgaattcgaggaaatgggagccgtcggccaggcgcgccaggatctcgcgcacgtcatagggtttcttcgggtcgtcgggtatcagccccagcagctcgtcgatggggtacagcggctctgcgtaggcgcgttttggcgcggggggcaggcaatcattccagggcaacaggctgacaatttcacgcgcgatgcgtacgccgtcggcgtcatgttccgccaggtattcggcggtgccggcgatctgggcgtgcatctcggcgccgcccagttcttcgtcggtcgccacttcgccggtggccgctttaagcagcggcggcccggcgaggaacagcttggccttgccgcgcaccaccaccacgtaatccgacagccccggctgatacgcgccgcccgccgtggccgaaccatgcaccacggtaatctgcggcaagcccatggccgacaggcgcgcctggttggcaaagctgcgcgcgccttcgacgaaaatctcggccgcgtaattgaggttggcgccgccgctttcggccagcgtcaccaccggcagtttgttctccatggcgatttgctgcaggcgcagggactttttcaaacccgaaggggaaattgtcccgcccttgattgcgctgttattggccaccaccagcaggcgcacgccgctgacgtagccaatgccggcaaccaacccgccaccggccgcgctgccgtccttgtcgtcgtggagtttgtagccggccagacctgccagttccagaaacggtgcgccggggtccaacagcaggttgaggcgttcgcggggcagcagttggccgcgcttgtcgaacttgggcttggcttcctgtgccttactcagcaggttttgctccagctggcgcaggtgggcgatagccgccagcatggccgcgcggttctgcgcgaattgcgggccgtgggtgtcgagagaagtttcaatcaccggcatgggttattgctccgccttgagcacatcaggcaaatatgcgcggtgaaagccattgaacggctcgctcggcgattgtgccttgtgcaaaggccatgcgcggctgcccaggctggcggcgccgtcgatgcgcaacgtgctgccgctgacgaaggcggcagcggggctcaacagaaacacgatggccgcgctgacttccgattcggtgccgatgcgcttgagcggcacgtgctcacgtaaggtcgggatcaccgccttgaaggcaccttcgtaggtgtccatgccgctggaagcgatccagcctggcgccacggcgttgacgcgcaccccggcgtagccccactcaaacgcggccgtcttggtgaagttgtccatgcccgaacgcgccgcgcccgagtggcccatgccgggcatgccgccccacatgtcggcgagcatgttgacgatggcgccaccgtgcttgctcatggactggttgaacacttcccgcgccatcagaaaaccgccgaccaggttggtgcgcagcacggtttcaaagcctttttggttgatcgatgccagaggcgacgggtattggccgccggcgttgttcaccagcccatggatctgcccgtgtgcctgaatgatttgcgtgaccagcgctttcaccgcttcttcatcgcgaatatcgcaggccagccagtgggcggtgccgccgtcctgggcgatttccgccgcgaccgtttgcagtttctgcggcttgcgccccaccagaatcacgcgggcgccaagggccgccagctcatgggcggtgcaccggccaataccgctgccgccgccggtgactatcacggtctgcccctggaacaggtcggctttgaagatcgagtcgaaggccacggcaacgctcctttaagtgagttgatcggcaatgtgctgcggcacggcgatggggatttccagcagttgctgggcgaaggctttgccttgcgggtcgatgcgcaggctggcgatgccgccgccgcccagggcgttttccagcaggaaattcaggctgtggctgccgggcaggtaccagcgttcgacacggccgagctgtgggtcgagcacgtggtccatccagtcgacgatcacttcaggtgtcaacgcttcggcaatccacggcaggaagtcggggtggcgggcgatcacgccgatattgctgtggttgcctttgtcgccggagcgcgccacggcgagtttcaccagcggcacgctggcgtcggcgcggccctgaggtttgggtggctgcacaggtgcgttcggtgtgagacagggcgcagaggcgggcaactcggtaacgtggcgcgcaccctggaggtcgatcaccaagtcacaggccgatttgtcgatcaggaacgaaaacaaccgaatcaacggatacaccgtgggccgcccgccgacgatgccggtcagccccggcgccatgccggttgccgcctgagcaatttcacgggcgaacagcaccaaggcttgtttgctcgggtgacgcaccgccagcttgaccaccacttcgcggcagtcctggcgcttggcgtgggcaccgtaggtggcttcgctgccgagcagttcgatgttcacttcggtgtagggtgcccagccgcgttggcggaacagttcggcggtcttgttgatgatcgcctggctgacgcgccgggctttgtcgaccgcatcgatcccggcaatgaggcaactggcggtgcaacgaaaaccgtccggataagtggcgctgaccttgtattgatcggtgggcggcgagcccttcgcgccgtgcagtcgcaccgtatttttaccctgttgctgcaatttgacctggctgaaatcgcagatcacatccggcagcaggtaggcgcgggggtcgccgatttcatacagcaattgctcggcgacgttcagctcgctgatcagcccgccagtgccgtcgaccttgttgacggtgaactggccgtcggcgctgacctcgacgatgggaaaaccgatgtgctcgtagtccggcacgtcgcgccaatcggtgaagttgccaccggtgcactgcgcgccgcactcgatgatatgcccggccagtgctgcctgggcgaggcggtcgtaatcgtgccaggaccagttgaattcatgcaccagcgcggcgctgaccacggcgctgtccaccacccggccggtaatcacgatatccgcgcccagcttgagcgcggcggtaatcccgggggcgccgaggtaggcgttggcggacacacaaaccggcggcaatggcgcaccgttgtacaggtcggtaatgccgtgcaggtgtgtgagttgggggtgcaggtcatcgccgagcagtacggcgattttcagcgcaaccccggccttgtcgcaggccgcttgcagggcagcggcgcaggcctgggggttgatgccgccggcgttgctgatcacccgaatgccttggcgttggatatctgccagcagcggcgccagcacgtcgacgaaatccgtggcgtaacccgcttgggggtctttcatgcgcgcaccggccaggatcgacatcgtgacttcggccaaatagtcgaacaccaggtaatccagcgcgccgccttgcaccagttgggcggcggcggtgcaggtgtccccccagaaggcgctggcacagccgatacgaaccgtcttgttcatgagaaatccttcccccgaatggctggcgtcgagactaccaagcaagcgcttggtttgtaaacgttggaaacaagttttgcccaagcgcttgcttggttgacggccacggcctaaattgccgcccaagacgtctgcacaagtgaaggagagtggcatggatgagcaaaaagccctgcgggtgatgcgcaccatggtcgacggcggccaattgaccgaccccgacagtgcccggggcaagttgctgcaaaccgcagctcacctgtttcgcaacaaggggttcgagcgcaccacggtgcgtgacttggcgagcgcggtgggcattcagtccggcagtatctttcatcacttcaagagcaaggacgagatcctgcgcgcggtcatggaggaaaccatccactacaacaccgcgatgatgcgtgcctcgctggaggaagcgacgaacgtgcgtgagcgcgtgctggcactgattcgctgcgagttacagtcgatcatgggcggcagcggcgaggcgatggcggtattggtgtacgagtggcgctcattgtcggccgacggccaggcccaggtgctggcactgcgcgatgtgtatgaacaaatctggctgcaggtgctgggcgaagccaaggccgccggttacatccgcggcgatgtgtttatcactcgccgcttcctgaccggcgccttgtcctggaccaccacctggtttcgcgccgaaggcagcctgaccctggaacaactggccgaagaagccctgctgttggtgcttgaggccgactaagccactcatttgatggcaaaagttgtctcgactgacaaaaacgcctagcttatcgccatcagagtgtttaacggtgtgtgccttgatgttatcgccatggcggctggctgcaggactgactttatgggcactgggcaccgcctacgggttgccggcttcggctgcgcaactggtgaggatcggcgccgcgcacttcccgccctataccgtacgccccgaacaaggcgccgatacgggcttgctgccgcaactggtcgaagccctgaacgctgcgcaaaccgactaccagtttgtgctggtgcccacctccatcccgcgccgctttcgggatttcgagcagggccgggtcgacatggcgatcttcgaaaaccccaactggggctggcaaggcattccccacaccagtgtcgatatgggcctggaagacgccgaaatcttcgtcgcccaacgtcagcccggtcgcgaccagcgctacttcgccgacctcaccggcaagcgcttggcggtgttcagcggctaccactatgcctttgccaacttcaaccccgacccgaagaacatggccgagcatttcaacgccacgttgacctattcccatgacagcaacctgttgatggtggcacgcgggcgggctgatatcgccctggtgacccgctcgtacctgagtgacttcatggtgcgcaacgcggacatggccggcaacttcctggtgtcggagcgcatcgaccagatctatcaccattacgcgctgttgcggccaaagtctccgatcagtggcgcggcgtttgccgggttgctcaagggcctgcgggacagcggccagatgctgaaaatcttcgaaccctaccgcatcgatgtcacggcggtttccacaacgccttgaccggctaaatttttcggcgttgctcacgtcacttcttttatctgcagacgaataccgtgagccgccaccatgaatgacttatctgccctgccattgccggccgggcccgcactgaatgccgatgaaaccgacagtcgcctgagcctgaccctggaaggtcagccactgattcgcctgcgcctcgagcgcggcgatgaattgcacgtgcatttgcaggaggccaacagcgttgccaaccctcacgccttgtggagcgcctgttactggttgttggtcaaggagcccgcgcgccagcgtgtggtctggcatttagagcatgtgcctgaagaggcgctgcgcagcgggctgctggtggcaaccgaggtggcggggcagtttcgctgcgagcgcacgctgttctggcagttgccccagccctggcttgcccaccccttcagcggcagctacccgcagcagatgctcatcagcgccggcaagcgtcatccggcccgggcgcccaagccgcgtggcgaggtttatcgccgtttcgatgcgcggctcggcgcctggatttccttgcgcaccgtcgaaatcgacgtggacctggcccgcttcaatcgttggcagaacagcacccgtgtggcgaatttctggcaggaaaccggcagcctggaacagcaccgcgaatacctcgacaagctcgacgccgaccctcataccctgacgctgatcggctgcttcgacgacgagccgttcgcctacttcgaagcctattgggccaaggaagaccggatcgcaccgttctacgacgccggtgattacgaccgcggcattcacatgctggtgggggaggagcatcaccgcgggccgcacaaggtcgccagctggttatcggcgctggtgcactacctgtttctcgatgacccgcgtacccggcgcgtggtggcagagccgcgtgccgacaacgcgaagatgatcggccacatgcacaaccaatgctttcactgcgacaaggaattcgacttcccgcacaagcgtgcggcgctgatgattctggggcgggagcgtttttttgagcggtgtgggttgaactgaatcgcctggctttatgtgggagctggcttgcctgcgatgcagacacctcggtctttcagctaaaccaagttgatgctatcgcaggcaagccagctcccatacaaagccagctcttacagctttcagccagtggatcaaacccgccgcgcaaacgtatcgctgtggctgcccgacaccttgcggcaatgcaccaatgcatcccgaatcatgaagttcaccagggtcggcgatacgccgagttccttggcgatgtccttttgcggtacgccgtgcaggcggtacatctcgaaggcgtagcgggtgcgctggggcagctccgtcaaggcgtcggcgatgttttccagggtgttgaagttgatgtgagaggtttccggtgaagcgccgtgaatgaccacattcaatccttcctcttccgtcccggagtacttgagctccagggcctgcttgcgatagtgatcgatggccaggttgcgcacgatctggaacaggtaactgagctgggccttgaacgatgaggtgatcgtcggtgctgactgcaatcggaagtaggcgtcctgcactacgtcttcagcgcgagagcggcagcccgtgatgcgtgccgcgatcttgaccagaatcagccggttgtcgacgaatgcctggagaagcggtgagtcgcacctgcctgtggatacttgttccgtcatggaaatcaccttgttgcaaaagaggttgggggagggcgtccttgctgaagcctcctacacatcgggcaacaaattatgcttaatgataatgattgtcaaatgagaaggcgaactaatcttatgtcttctcgttaggtgtgaggtacgtcgcactcgtctcctgcgactaattatctggcgcctccgtccgttctcttgggtgacaggtccgttggtgaaacggccaaggatcagcagccgcaggagggcgagatgggtttttatcgtgcacgcagcgtgtttcagtctggagccctcgcaccatgagtgcgccggctcggttacgtctgttttgcctgccctactcgggcgccagcgccatggtgtatgcgcgctggcgccgggttttgcctgactggttgcacgtgtgcccactggaattgcccgggcgcggcatgcgtatggatgagcccttgcagcgcaacatcaaggccttggcggcgcagttggccactgaaatcagccacgacttgagcgggccgtatgccgtattcggccacagcctcggtggcctgctggccttcgagttggtgcatgccttgcgcgaacgtggcgtgcccgcgccactggccttgttcgcctccggtaccgccggcccggcgcgccgtgacgtcagcgaatacgccatcgagaagaccgacgagcaactgatcgcccgcctgcgtgagctcaaaggcacagcagaagatgccctggccaaccccgagctgatgcagttgatgctgccgatcctgcgtgccgattttctgttgtgcggcagtttcacctacggcgcgcgtgagcccttgcacatgccgatccacgtgttcggcggcaagcaagacagcgtgcgcgccgaccagttgctcgactggcaggccgacgccgccagcggcttctcactggacatgtttgacggccaccacttctttctcgtgcagcacgaaagcgctgtgctgcgctgcctgcggcgctatgccgatgagcacctgacccgctggcgcactggcgcggcgcggcagctggccgccggctgaacgttctctaattcccgacttaccgtaagccgatttcaggcaggaaccccatgatggacgccttcgaacttccccgcactctggtccagtcccttcaacgccgtgccgagcaaaccccggaccaggtcgccttgcgcttcctcgccgagtccgccgaacacagcgttgtgctcagttaccttgagctggatcagcgcgcccgcaccatcgccgccgcgttgcaggccaatgctgagccgggcgaccgtgcggtgctgttgttccccagtggcccggattacgtcgcggcgttttttggttgcctgtacgccggggtgatcgcggtgccggcctatccgccggagtccactcgccgtcatcatcaggagcgtttactgtcgattattgcagacgctgagccgcgcctgttgctgactattgccagcctgggcgatggcctggcgcagatcgacaacgcgccgccggtgctgagcgttgacacactggtcgccgcaattgcgggcaactgggtcgcccccgagctgcaccccgacgacatcgccttcctgcaatacacctccggttccaccgcattgcccaagggcgtgcaggtcagccacggcaacctggtggccaacgaagtgttgatccgccggggttttggtatcgacctgaacccggacgacgtgatcgtcagctggttgccgctctaccacgacatgggtctgatcggcggcttgctgcaaccgattttcagcggcgtaccctgcgtgttgatgtcgccggcttactttctcggccggccgttgcgctggctggaagcgatcagcgaatacggcggcaccatcagcggtggccccgatttcgcctaccggctgtgcagcgagcgggtcagtgaaaccgcactggaacgcttggatttgagcacgtggcgcgtggcctattcgggctccgagccgatccgcctcgataccctggagcgctttgccgagaagttcgccgtctgtggtttcaccgcgaacaacttcttcgcctcttacgggctggccgaggcgacgttgtttgtcgccggaggcacccgtggcaacggtatcccggcgttgcgcgtggacgagcacgccctggccgccaaccgtgccgagccggggcagggcagcgcgatcatgagttgcggcaccagccagccggaacacgcggtgctgatcgccgacccgcacaccctcgccgagttgcccgacaaccacatcggtgaactctgggccaccggcccgagcatcgcccatggctactggcgcaaccccgaagccacggccaagatttttgtgcagcacacgggccgcacctggctgcgcaccggcgacctggggtttatccgcgaaggcgaggtatacatcaccgggcgcctgaaagacctgctcattgtgcgcggccacaacctgtacccgcaggacatcgagcaaaccatcgagcgtgaagtggaaggggtgcgcaaaggccgggtcgcggcgtttgccgtgcgggaccagggcctggaaggcatcggcatcgccgcggaaatcagccgcagcgtgcagaaaatcctgccgcccgaagcgttgatcaaggcgatccgccaagccgtggccgagacgtatcagcaagccccaagcgtggtggtgttgctcaaccccggcgcgttgccgaagacctccagcggcaaggtgcagcgcgcggcgtgtggcctgcgccatgccgacggcagcctcgacagctacgcgcagttccccgagctgcacgcgcaggcgggggacgcggcgttggaggccggactgcaaagccagattgcagcgatctggtgcgaacagttgaatgtcgcgacggtcgcggccgatgaccatttcttcctgctcggcggcaactccatcaccgccacccaagtggtcgcacgcctgcgcgaaaccctgggcctggaactgaacctgcgcatgctgttcgaggcgccaagcctcggcgcttttgccgccagcgtggcgcaattgcagcagggcgggggcgtggtgcaaggcgcgattcaggccctgtcgcggcaaggggaactgccccaatccctggcgcaaaaccgcctgtggatcacctggcaactggacccgcagagcagcgcctacaccattcccggcggcttgcgcctgcgcggtgaactggatgaagacgccgtgcgtgccagcttccagcgcttggtccagcgccatgaggccctgcgcacgcgtttctacgaacgtgatggccaggccttccagcgtatagatgcaaaagccgcattcgacctgcaggtcatcgacctcagcgacctgcccgctgccgagcgtgaagcccacgcgcaacagatccgcgaagacgaagcacgcacccagttcgacctggaaaacggcccgctgctgtgggtaacgctcgttcgcctggacgatgaagatcaccagttgctggtgaccctgcatcacatcattgccgacggttggtcgctgactatcctgatcgacgaattctcgcgcctgtatgccgccgcgacccagggccaaaccctggaactgccgccgttggccctgcaatacgccgactacggcagctggcagcgccaatggctggcggagggagaagggcagcgccaactggcgtattggaaggcgcagttgggcgaggaacacccgagcctcagcctggccactgatcacccgcgctcggcgcagcaccttcatagtgcttcgcgccatagcgtgcgtttgagcacccgcctcagcgcagcgatccgtcagaccgcccaggccaacgaatccacgccgttcatgctgttgttggcggcgttccagagcctgctccatcgctacagcggccagcgcgacatccgcatcggcgtgccgaatgccaaccgcccacgccaggaaacccaaggcctgatcggcttctttatcaacacgctggtgctgcgcgccgaactggacgcgcggttgccattcaatgaactgctggctgcaacccgcgagacggtcatcggcgcccaggcccaccaggacctgccgttcgaacaactgctcgaagctttcccgcaagcccgcgaacagggcctgttccaggtcatgttcaaccaccagcagcgtgacctgagcgccttgcgccgcctgcccggaatgctcgccgacgaattgccgtggcacagccgcgaagccaagttcgacctgcaattgcacacggaagaagaccgcaacgggcgcctgagcctggcgttcgactacgccgatgaactgttcgaagccgcgaccatccagcgcctggccgagcacttcatcaacctgctgagtgcggtcaccgagcagccgcaccaagccatcggcgacttcaagctgatgcagcaaaacgagcagcaaccgtggagcgaagcgccgtgcacaccggcacagcaatggctgccggaattgctcaaccgcaacacctgcgacgacaccgcgctggtctggcaaggcgccagcctgagcttcgcccagctgcacacccaggccaaccgcctggcccactacctgcgcgacaagggcgtgggcccggacgtgtgcgtggccatcgctgccgagcgctcgccgcaactgttgatcggcctgctggcgatcatcaaggccggtggcgcctacgtgccgttggacccggactatcccgccgagcgcctgggctacatgctggaggacagcggcgtgcacttgctgctgacccagaccgcattgctggagcaactgccgacggccgagggtgtgtgcgtgatcgccatggacagcctgcatctggacagctggcccacccaggcgccgggcctgcacttgcacggcgacaacctcgcctacgtgatctatacctccggctccaccggccagcccaaaggcgtgggcaacacccacgcggccctggccgagcgcctgcaatggatgcaggccacttaccaactgaacgccagcgacgtgctgatgcaaaaggcgccgatcagttttgatgtgtcggtatgggaatgcttctggccgctgatcaccggttgccgcctggtgctggccggcccgggcgagcatcgcgatccgcaccgcattgcgcagctggtacaggagcacggcgtgaccacgctgcacttcgtgccgccgctgttgcagctgtttatcgacgagcccttggtggccgaatgcaccagcctgcgtcgcctgttttccggcggtgaagccttgcccgccgagttgcgcaatcgcgtgttggcgcaattgccggcggtgcagttgcacaaccgttatggcccgaccgaaaccgcgatcaacgtcacccactggcattgcacagccgcagatggcgagcgttcgccgattggccgcccgctgggcaatgtgatctgccgcgtgctcgatgagcagctcaatcccgtgccattgggcgtgccgggtgaactgtgcatcggcggaatcggcctggcccggggttaccttggccgtcccgggttgaccgccgagcgttttgtcgcggatgaccagggcacgcgcctttaccgtaccggcgaccgcgcacgctggagcgccgacggcgtgcttgaatacctcggccgtctcgaccagcaagtgaagctgcggggtttccgggttgagcccgaagaaatcgaagcgcgcctgttggctatcgacggggttgcccaagcggtggtgctggtgcgcgacgcgcaactgatcggctactacaccgcccatgccgcgctggacgaacacgacgtcaaaaccgcgttggccgccgaactgcccgaatacatggtgcccgcgctgttgatgcgcctggaggccatgcccctgagccccagcggcaaactcgaccgccgcgccttgccggagccgatgtggcaaacccgtgaacacatcgaacccgagaccgcgttgcagcagcagattgcagccatctggcgtgaggtccttggcctgccgcgtatcggcctgcgtgacgacttctttgccctcggcgggcattcgttgctggccacgcaaatcatttcccgtacccgccaggcgtgcgacgtcgagctgccgttgcgcaccttgttcgaagccagcgagttgggcgcttttgccgaacacgtggctgtgatccaggcctcgggccagcgcaaccaacagaccgccatcgccaaggtcgaccgcagccagccggtgccgctgtcctactcccagcagcgcatgtggttcctctggcagatggagccggacagcccggcctacaacgttggcggcatggcgcgcctgcgtggtgtgctggacgtggggcgtttcgaggctgcgttgcaagcactgatcatgcgccacgaaaccctgcgcaccaccttcccgagcgtcgatggcgtggcgtgtcaaaaggtctcgccgcaaaccggcctgcgcatggactggcaggacttcactgcgctgaacgaaaccgagtgccagcagcgcttgcaacaactggcagatgtagaggcccacaccccgttcaatctggaaaccgggccgctgctgcgcgcctgcctggtcaaggccggcgagcaggaacactatctggtgctgaccctgcaccacatcgtcaccgaaggctgggccatggacatctttgcccgtgaactcagcgcgctgtacgaagcctttatcgacgagcgtgactcaccgctggcgcccttgccggtgcagtacctcgactacagcgtgtggcaacgccagtggctggaggcgggtgaacgccagcgccagctggactattggaccgcgcagctgggcaatgaacatccgctgctggagctgcccggcgaccgtcctcgcccgccggtgcaaagccaccagggtgagctgtaccgcttcgatttgagcgacgagctggcggcccgcgtgcgtgctttcaacgccgagcgcggcctgacactgttcatgaccatgaccgccaccctcgccgtgttgctctaccgctacagcggccagaccgacctgcgcatcggcgccccggtcgccaaccgcatccgcccggagagtgaagggctgatcggtgcattcctcaatacccaagtgctgcgttgccgcctcaatgggcagatgaaggtcggcgaattgttcgaccaggtgcgccacaccgtgatcgaaggccagtcccatcaggacttgcccttcgaccacctggtggaagccctgcaaccaccgcgcagcgcggcgtacaacccgctgttccaggtgatgtgcaatgtgcagcgctgggaattccagcagagccgccaactggcgggcatgaccgtcgaatacctggccaatgatgctcgcgcgaccaagttcgacctcaacctggaagtcaccgacctcgaccaccgcctgggctgctgcctgacctacagcaccgacttgttcgatgagccacgcattgcacgtatggccgggcattggcgcaatctgctggaggcgttgattgccgacccgcagcaacgcctgagtgaattgccgctgctgaacgcggaggaacagcgcgtgctgcaaggcagtctgggcatcgaaaaaggtgaacaccgtctcgatcagtgcctccagcaactgttcagccggcaggccgccgcccgaggtgatgcgcccgcgctgacctttgccggcgtgaccctgagctaccgcgagctggacgcccgcgccaaccgcctggcctggatgctgcgcgaacgcggcgtgggtccgcaggtgcgtgtcggcctggcgttgccgcgctccctggaaatggtcatcggcctgctggcgattctcaaggccggtggcgcttacgtgccgctggaccctgaatacccgctggaccgcctgcattacatgattgaagacagcggcatcggcctgctgctcagtgacgcggcgatgttcgaagcgcttggcgaattgccggcgacagtggcttgctggtgcctggaggacgacttgccggtgctggccaattacccggccgacgcgctcccctttatcagcctgccgcaacaccaggcctacctgatttacacctccggctccaccggcaagccgaaaggcgtggtggtgtctcacggtgaaattgccatgcattgcgcggctgtgatcgagcggttcggcatgcgcccggacgactgcgagctgcatttctattcgatcaacttcgacgcggccaccgagcgtttgctggtgccgctgctcagtggcgcgcaggtggtattgcgtgcccagggccagtgggatgccgaggaaatctgtgggttgatccgcacccatgccatcactgtcctgggcttcacgccgagctacggcagccagttggcgcaatggctggcgactcaacagcagaccttgccggtgcgcatgtgcatcaccggcggcgaagcgttgaccggggaacacttgcagcgcattcgtgcggcgttccagcctgaggtgtttttcaacgcctatgggccgaccgaaacggtggtgatgccgctcgccagtctcgcgcccgaaaggctggaagaaggcgcaggcagcgtgccgatcggcagcatcatcggtgaccgcgtggcttacattctcgacgccgacctggcgttggtgccccaaggcgcgaccggcgaactgtatgtgggcgggggcggcctggcccaggggtatcacgaacgtccagggatgaccgcggagcggtttgtcgccgatccgtttgctgccaagggtgggcgtttgtaccgcaccggcgatctggtgcgccaacgcgctgacgggttggtggagtatttggggcggatcgaccatcaggtgaaaatccgtggtttccgcatcgagctgggcgagatcgaaacctgtctgctcgaacacgaagccgtgcgtgaggcggtggtgctggcgctcgattcgcccagtggcaaacagttggtggcttacctggtcagcgacgtcgaccacagcgccttgcgcgagtccctcaaggctcatctgaaggcgcaactgcccgactacatggtgcccgcgcacctgattgtgctggccagcatgccgctgaccgccaacggcaagcttgaccgccgcgcgttgccgccgccggatccggatgccaaccgccagcagtacgtggcgccgcgcagcgagctggagcaaaccctcgcggcgatttggtgcgcggtgctgaacgtgcaacgcgtcggcctggacgataacttcttcgagctgggcggcgattcgatcctgtcgatccaggtggtcagccgcgcgcggcaggccgggattcacttcagcccgcgtgacctgttccagcaccagaccgtgcaaacgctggccgctgtcgccacgcgttccgagcaggtcacggccgagcaaggtgtgttgaccggccgttcggggctcacgccgatccagcactggttcttcgataccgacattcccaaccgtcagcactggaaccaggcgctgctgctcaagccactgcaattgctcgacccccatcgcctggagcaagcgctgctggcggtgctggaacatcacgatgccttgcgcctgagcttcaccccgcgcgatgcccagtggcatgccgaacacttggccgtgccccagggcggcgtgctgatgcaggcgcaggtgcgcgatatggaccaatgcacggcgctgttcagcgacacccaacgcagccttgaccttgcccatggcccgctgctgcgcgccctgctggtggacggccccgaaggccagcaacgcttgctgattgcgatccaccacctggtggtcgacggcgtgtcgtggcgcgtgttgctcgaagacctgcaaaacgtctaccgccagctcactgagggcgaatccgtcagcctgccggccaagaccagcgccctgcgtgactgggccgcgcgcttgcaagcgtatgcgggcagcgagtcgctgcgtgaagagttgagtgtctggcaggatcaactggctggcccggccgtggaattgccggtggaccgcccgcaaggttcactgcgcaaccgcgatgccgacactgtcagcgtgcgtctggatgccgaacacacccgccagttgttgcaacaggcaccgagtgcttaccgcacgcaggtcaacgacgtgttgctgacggccctggctcgggtgttgtgccgctggagcggccacgaatcgacgctgatccagttggaaggccatggccgcgaacccctgttcgatgaaatcgacctgacgcgcagcgttggctggtttaccagtgcttatccactgcgtttgacgccgcaggcggagcagggcgcgtcgatcaaggcgatcaaggagcaattgcgcggcgtgccgcacaagggcctgggttatggcgtgctgcgctacctggcggacgacctgatccagcagactctgcaggccttgccgtgcgcgcaaatcaccttcaactacctgggccagttcgaccagagtttcggcgccgacgcgctgttccatccgctggatgaaccggccggtctggcccacgaccccgacgcgccgctacctaacgtgctgagtgtcgacagccaggtgtacggcggtgagctggtgctgcgttggaccttcagccgcaagcgccatgatctgcagaccatccgggagctggccgaggcgtatctggccgagctgcaaagcctgatcgcccattgcctcacgggcgaagccggcggcatcacgccgtccgacttcccgctggcgcgcctgacccaaccgcaactggacgccttgccggtgccggccagcgccattgaagacgtgtacccgctgacgccgatgcaggaaggcctgttgctgcacaccctgctggagccgggcaccggcctttattacatgcaggaccgctaccgcatcaacagcgccctggaccctgagcgcttcgcccaagcctggcaagccgtgattgcacggcatgaagccttgcgcgcctcgttctgctggaacgtcggcgaagacatgctgcaagtcatccacaaaccgggcagcacgccgattgagtacctcgactggagtgcggacccggaagcggaacaagagccgcgtctgcaagccttgctcaaggccgagcgcgaagccggtttcgatctgctcaaccaggcgccgttccacctgcgtttgatccgcgtgggtgaagcacgctactggttcatgatgagcaaccaccacatcctcatcgatgcgtggtgccgttcgttgctgatgaatgacttcttagacctctacatggcccttggcgaaggccgcgacgcgcaactggccacgccgccgcgctatcgcgactacattgcctggctgcaacgccagaacctcgccgaggcgcggcagtggtggcagcagaacctgcaagggttcgagcgcaccacgccgatcccgagcgaccgccccttcctgcgtgaacacgcaggccacagcggcggcatggtggtgggcgattgctacacccggctcgatgcccgcgatggcgcgcaattgcgtgaactggcccaggcccatcaactgaccgtcaacaccttcgcccaggcggcgtgggcgctggtgctgcgccgcctgagtggcgaccgcgacgtgctgttcggcgtcaccgtggccggtcgcccggtggaaatgcccgagatgcagcgcaccgtcgggctgttcatcaacagcattgcgctgcgggtgaaactgccgcaagacgatcaaccgtgcagcgtacgccagtggctcagtggtctgctcgacagcaatatgcagctgcgcgagtacgaatacctgccgctggtgacgatccaggaacacagcgagctgcccaagggccagccgctgttcgacagcctgttcgtgttcgaaaacgccccggtggaagtctcggtgctggaccgtgcgcaaagcctgaatgccacctcggattccggccgtacccacaccaactttccgctgaccgccgtgtgctaccccggcgacgaccttggcctgcacctgtcttacgacaaacgttacttcgacgaaaccaccgtgcagggcatgctcggtgagttcaagcgtttgctgctggcgctggtgcagggcttccatggtgacatggccgacctgccgctgatcggcgaacaggagcgtgagtttctgatcgaaggctgcaatcagagcgagcatgactacccgctggaacgcagttacatcgagctgttcgaagagcaggtggccgcgcatcctcagcgtatcgtcgccagttgcctcgaccggcagtggagctatgccgagttgaaccggcgcagtaaccgcctcggtaacgcgctggttctggcgggcgtcgggcgggatcagccggtggccttgctggctgagcgcaacctcgacctgctgggcatgatcatcggcagcttcaaggccggtgccggttacctgccgctggacccgggcctgccaggccagcgcctgagccgcatcattgacctgagccgcacgccgttgctggtgtgcaccgaagcgtgccgtgagcaggcgctggaactgcttgaagaattcgcctgttccgcgcggccgaagttgttggtgtgggacacgctggcacctgcggatgaaaacccgggcatctacagcgccccggacaacctcgcctacgtgatctacacctcgggctccaccggcttgcccaagggcgtgatggtggagcagcgcggcatgctcaataaccagttgagcaaggtgccgtacctggacttgagcgccgcggatgtgatcgcgcaaaccgcgtcgcaaagtttcgatatctcggtgtggcagttcctcgccgcgccgctgtttggcgcgcgggtggatattgtgccgaacaccatcgcccacgatccgcaaggcttgctggcgcatgtgcaggcccagggcatcaccctgctggaaagcgtaccgtcgctgatccaaggcatgctcgcccaggaacacatccgcctggatggcctgcgctggatgctgccgaccggcgaggcgatgccgccggaactcgcgcatcagtggttgctgcggtatccgcaagttggcctggtcaacgcctatggcccggcggaatgttcggatgacgtggcgttcttccgcgtggatgtggcgtccacccgtggcacttacctgccgattggtacaccgaccgacaacaaccgtctgtatctactggatggcgcgcttgagctggtgccgcaaggcgctgtcggcgagctgtgcgtggccgggacgggggttgggcgaggttatgtcagtgatccgctgcgcacggcttgcgcgtttgtgcccgatccgttcggtgcgccgggcgagcgtctgtaccgtaccggcgacctggcgcgccggcgcagcgatggcgtgctggagtatgtggggcgcatcgaccatcaagtgaagattcgcggctatcgcatcgaattgggtgaaatcgaagcgcgcctgcacgagcagcccgaggtgcgtgacgcggcggttggcgtgcaggaaggcgtcaacggtaagcatctggtgggttacctggtcgccgctgacacggcactgaacccgggcgagcgcctggaccgcatcaagcagcgcctgcgggcggagctgccggagtatatggtgccactgcactggctgtggcttgaccgcctgccgttgaatgccaatggcaagctcgaccgcaaggccttgcccgccctggaaatcggccagtcgcacagccaggactacctggcgccacgcaacgaactggaaggcacattggccgcgatctgggccgaagtgctgaaagttgaaagggttggcgtgcaggacaacttcttcgaactgggcgggcattcgttgctggctacgcagatcgcttcccgcgtgcagaaaaccctgcaacgggatgtaccgctgcgggcgatgttcgaatgcagcacggtggcgcaattggccgagtacatcgatgggttggcggcgcatgatatcagtgccgaaaaagtggatcggttgagtgacctgatggcggagctggaggggctttaatctgctttgcctgtcagggcctcatcgcgggcaagcccgctccaacatgttgaactgtgagtacgttcaagtgtgggagctggcttgcctgcgatagcgccagtccaggcgccgcttacttgggcccggttttttgcaatgcctcctgtcaaccttgacagtattcaacgctgtcgttcaggcgttagataacccgtgtattccggtcattactgatcgtcattcagcacggcgcaggaggtctcatcgtgactcacgaattatccccatgtaacaactgtgcaggggcgtcggctccgtgttcctgccacgactgtcgtgagcaaacgtttgtcccgggagagtccagaacgatcacggtcaagcgcacttcaaacgtggtgcacacgtgcgaggtgacgtcgaatcagcgctacggcattgacttggcctcattgattgcgcctaaagtgcgtgaggaaaataataaaaatgagctggtactgctttacttttcaggtgacgcccatgtctttgtggaaaaaggcgggcttctgcgggcaggcgaaagggcgtggttgaccgtctctggaatgggtaaggatggcgttctcgttacactcccattgttgaacggtgacttgattacgcccgacgatgaaaaaaatggactaacacgctctatcccaagagcaaaactgcttgagtttcccgacaaaacccttctgacgattaccttcaaagtcagcacgtgcagcaatagttgtgataatgagttgattgtttatccggatcagacctgtacgcttcgcaagccttaccgggacctgacaacctttgatgaccgcacgttaggcaagtgggcaacaggccctggggcggctgacccaacggatctcagctatgtacctcagggggccgggtttatattgaaaaacatgacgtggtcgacgtcgggcattggaaccgttttatggcggtcatttgatgaacttgagattaatcataagtatcgattcagcattgctgtgcgcagaggcagcatctatgatccgctccccatactgtcattacgcctgaacgatgtggaccagaccgcccctgagcaacttgcggatcttgtgaactggaaaacgctcttttttgatttcgtggtcacctcgttacctgtgaagctggaaatttacagtcaccagaatcgagggatagaaggtaatgacacggatctggacaatcttctggtcgaggagatcccgtaacgttacaagaatgcccgtgttcacgcgggcattctatttcatcttggcatcaagcctggcttcgctcttccaacgggttgcgccgatgagcttgctgcgcgtgtgagtccggttttttgcaaagcctcctgtcaaccttgacagtattcaacgctgtcgttcaggcgttagataacacctgtattccggtcattactgatcgtcattcagcgcggcgcaggaggctacatcgtgactcacgaattatccccatgtaacaaccatgcaggcggttcggcgccgtgttcatgccatgactgtcgtgaacaaacctttatccctggagagtccagaacgatcacggtcaagcgcacatcaacctcaacccacacgtgcgaagtgacgtcgaaccagagttacggcattgacctgagcacgttaatcgcaccgaaaatccttgaggaaaataataggaatgagctggatctgcgtaactttccgggggacgctcgtgtctttgtggaaaaaggcgggcttatacgttcaggagaaagggcgtggctggtcgtcactggaatcggcaggaatggagttcccgtcacgctcaaattgatggacggtgacttgattagcgtcgacgatgaaaagaatggtctgacacgctctattccgagagcaagactgctcgagttcccccacaaagcgctcttgacgatcagtctcaaagtcagcacatgccacaatagttgtgataatgagttgattgtttatccggagcagacctgcactgttcttatcccttatctggaccatacaacctttaatgaccgtacctatggcaagtggacagtaggcgccgcggcttctgacccgagggatctatcgtttgtaacgttgccagatggcacagttatattgcaaaacatcacgaacgcagccaatagcattgggcccatgttgtcgagaacattcaatgatcttgatccgggtcgccagtatcaattctccgctgacgtgaaacgggcctatgtcgcggcgggccaggtccccgagctatcgctgcgtgtgaacggtgcagacctgaccagcgcgagcctccctgacgacaaagtctggacaacgctcagttgtgttttcacggccccctcgaaaacctcaacgctcgagctttatagccttgtgggggctgctcaaggaaaccttggcaatgactaccacatgaaatcactgacacttgtcgggctttagcagcactcaataaaatgcccgcgttaacgcgggcattttatttaaccgattgggctgatcacttcggccccagaatcttcaccagcttctccggcgacggtgcgccttgctgttgctgcaagccgcccttgtcatccagatagaaaattgccggggtcgccgatagttccagctcatccatcaacttcatgttggcatcgagcttggcttcgatgtccgccgggatcttgtccagcgcctgcaatttgctgcctttgccggcggcttcgtgttcttccagagctttttgcgggtctttggcggcgaacaacgctgcggatttacccgggctgtcttcgcggatgatgccgaccatgatatggcgcaactgcaccttgccggccttgacccacggccgcgcctgttcccagaacatgttgcagtacgggcagttcgggtcgctgaacaggtagacgatgcgcggcgcgtttttatcgccgtcctgaatccagttgctgtgctccatcttggcccagacttccttggccatcggcgcgtagacgagtttttccagcggcgcgctgctcaggtcattgccctgggcgtcgtacaggttgccggcgatcacgcttttgccgtcggcggtcaggtacagcgccatgccacggttctggtattgcgcggcgtagccggtgaggccgctgggagcgtcgaatttgccgaggatcttggcgcccttggcctcgatctgtttgatcggcgcgggccagtcttcagcctgggccagggcggcggccagcgtcagtggcagcagggtcagcaggtggcggagtcttggcatgtcggtttccttgcaggggcggtgtcgaagggttccatggcacgggccaggctggcttgggacagttcgcccaggtggctgttgatcaggcgcccgtcggcccggtagaacaacgtggtcggcagggccatggagcccacggcctggccgaggcggccgctggcatcaaacagtacgttgtcgagggtcaggccctgggttgcgagaaaggtactgacgctctgcatgctttcggcctggttgacgaacaggaaggtcacgtccggccgttgatgttgcgcgcgctccagcaccggcatctcacggcggcacggcgggcaccaggtggcccagaggttgatcaccagcgggccgcctttgtagtcggccagttgcaccacatcgccattggcgttgcgcagcgtgatgtccggcagttgtgcgcccttgtcgtaaaggctcagggacacactggtcagcccccagaacaccagcccggtgaccacgccggcgcccagcggcgtgcgcagggcagggcggcgccagccatacaacagggcgccgagtatcagcgcgatcacacccggccaggcgaggaagccaccgtcacgcaggtcgaccatttgcagcgggtcgtggcggtaatcactccagtacatcagcacaaaactgatacgcgccaccagcatgcccaacaggaacaggctgaacagcaccgattccgggttttcaccgccacgcttggccacgcgccagcccaccacagtggcgagaatcagcgcgccaatcagcaggatgtggttcagggcgatggcaaaggtgccgatggtcaggggcagcatcagcgcgcgtcccgggtttggatccagcgttgcaggaaggcggtggcatccacttcgccggtgatgcgctgggcgcggcgttcttcaccgtccgggctgatccacacgaagctcggtggccccggtactttgtagcggccgagcagttcacggctggcggcgttgtcggcggtgacgtccaggcgcagcaggcgtacgtccttgagggcgtccatcacttcaggttggccgaacacctgtttttccatgatcttgcacgacacacaccagtcggcgtagtagtccaccagcacccattggccttgggccttggcgctgtcgagctggctttgcagcacggccgggtcgctgatggtcatgaaggcgtcgtgggcgttcggcgcagcggcggtattcgagccaccgtagaccttcaaaggttgccacaggtcgtcgctgccaccggccgcgcccaccaccagcactgcgccccacaggccgagcaccagtgagccggcgccgaacactttggcagccaggccgtattcgcgggcgagcgtccagccgcagtaggccatgacgagagccagtgccccccacaggccgagccacaggcttgcatccacgaccggccgaatcatcaacacggcggtgccgaggaacaggaagccgaagatgcctttgagcacgttcatccaggtgcccggcttgggcaggaaacggttacccacggtcaccagcagcaacagcgggataccgatgccgatgcccatggcgaacaggatcaaaccgccgtgcagcgcattgccgctttgcgcgatgtacagcagcgcgccggccagtggtgcggtcatgcacgggcccaccagcaggccggacagggcgccaaggacgcctgcacccaccaggctgccgccgctttgctgacggctcacgttgtcgagacggtcacgcaggaaggcgggcagttgcagttcaaagaagccgaacatcggcagggcgaggatcacaaagagtgcggcaaaactgccaagaatccagggggtttgcagcagcgcggcgaggttgccaccagccagcgcggccaatacgccgagcgccgcatacaccagcgccatgcacacgacatagctgctggccagggcaaaaccgcgacgcgggctggcaccactgcctacgactaaacccgcaagaatcggcagcatcggcagcgaacacggcgcaaatgccagcaacaggcccaagccaaagaacaccagcaggctccagcccaggctgcgttgttgcaggccgctggccaggctttggtcctgggcttgggcggtggctgttacagccgggttgccaccgaggtccacggtgatcgactgcggcggataacacaggcctgcatcagcgcagccttgccagcccagcttgacctggccggtggcgcccgccgggatcttcacttccaggccctggcgatacacttgttgttcgccgaagaactcatcgctgtgggcttcgccttgcggcaacaccggcttttcggcgaggccgtcgaacttcaggcgttgctggtagaggtaatatccgtcggcaatctgccaatacagctgggtttcaccgctttcaagacgttcggaggtaaacgtgaacgctttgcccaccggcaggaaatcgggtttggtctcaaaggggttacccggcgaggcctgggcaaaccctgtgaacaacaccagcagaaaggtaaacagataccgcatggtcaagccttagttcgatgcaagtgaggcacacaatgtgtggcgttgattaaccgatgattaaccgcagctattctagagggtgcgggcaggttttagcggcataatctgcgcttaatccattgcacctttaattcccccatctttcatgaagggttaaccatgcacgtactggtctgtgaagacgacgaactgatcgccagcggcattgtggccggcctcagcgcccagggctttaccgtcgagcgcgtggccagcgccggcgccgcacgggcgatgctcaaggccgccacgttcgacatcatggtgctcgacctcggtttgccggatgaggacggcctcaagctgctgcaacaacagcgcagccagggcctggaaattccggtgctgatcctcaccgcgcgagactctgtaaccaatcgcgtcgacggcctgcaagccggcgccgacgactacctgctcaaacccttcgacctgcgcgaactcgccgcccgcctgcaaaccctgttgcggcgcgtggccgggcgcagcgtcaacctgatcgaacacggccgcctggcctacgacccgagcagccgcgagacgtttctcggcggccagccggtggacctgtcccgccgcgagcaggcgctgttgcaggcgttgctgcacaacaagggccgcgtgctgtccagcgaacagctcaaggacagcgtctacggcttcaatgacgagctggaaagcaacgcgctgaacgtacatatccaccacctgcggcgaaaattgggcaacggcattgtcgagaccgtgcgtgggctgggctatcgcctgggtaccgccgacggtggcgcggttgaagagggggaaaccgtttcgtgatgagtttgcgcctgcgcctgacgttcaagctgggcgccgcttttgtgctgatctgggccttggcggcagcctggatgctcaacgacctgcgcaaccagatgatgttctccctcgaccagcgcctggtggcgtcggcgcgcatggtggcggggctgaccgagcagatgcccggtcttgcgagtgtgggcagcaccacgcatttgcgcaccgagcagttgaacgtgccggggggcatggcctgtcaggtcagctccttgcgcggggaaatcctcgcgcgcagccacaccacgccggacgaaggcctggaatcgcgcaaaagcggctttcgtgatcaggtcatcgacggtgtaggctggcgcagtttcaccctgtcccggggcgatttgctgattaccaccgccgaccgccaggtcgagcgcgaggccttgaacctgtcgattttgctcgccgcgtcggtgccggtgggcgtggcgttgctcggttgcctgtgcctgttgtggctgggcatcggccagagcctggtgccgcttaaccgcatgcgcgatgcgttgatgcgccgaagtgccgattccctcgagccgttgcagattcacccgctgcccagcgaactgaaaccgctgctcgacacccagaaccaactgttgcagcgcattgccaagaccatcgagcgcgaacgccgcctgaccggtgatgcggcccatgaactgcgcagcccgctgacagcgatcaagacccacctacaagtggcgcgcatgaccgacggcgcggcgcgcgaccagtccctggcccacgccgaggagggcgccgaccgcctgcaccgtaccctggagcaattgctgttgctggcgcgggtggagggcaacctgtcgtttgacgatggtatgcactccagcgccgaggaggtggcacggctggccattcaggatgccaacgccggtgacaactcgcgcatcgacctgatcctgccggccaatctgtttgccaccccggtggaaatgccggtagggctggccgtcgcggcgttgcgcaacctcctggataacgccttgcgtcacaccccggcggacacccgcgtggagcttagcgtgttcaccggcaccgacaatgtggtgtttcgcgtacgcgaccatggcaagcagatttccagcgaggacctgcaacacctgacccaacgtttctggcgcaatggcagcagcgaaggctgcgggcttggcttggcgattgttcaggccatcgtgcaacgttgttcctgctcgttgaagttcgacagccagccggacggcctgcgggttgatctgggcatgccactgcgtcgctgattcctttttctcaggtcccaaataattaccgccatcccgagtgtgaacacctcaggatggcggtaatttttttgcgcttgaacgggccgaatgagtcggcctggattgaaaaggacagcttttatgttggtgatcgatagcagttttcccgcccgggacttcaatgaacgcatcggcgagcccgtgcgccaagtggtcctccattacaccgccgctccttttgcgtcgtccctgcacaccctgacccggcatggcgtcagcgctcactacctgctgcctgaccccgacgagcccggctaccgccatcgcggttatgacgagttgcgggtgtttcgcctggtcgacgaggacaagcgcgcctggcatgcaggcatgagccactggggcgggcgggataacctcaacagccgctcgatcggcattgaaatcgtcaacctggcgcgggatgacgctggggtgttcacgttcccggactatggcaaggagcagatcgaggtgctgatcgcattggtccgcgacgtaatggggcgttacccgcagatcgggccgaccgacattctcgggcatagcgatgtggcgtattggcgcaagagtgatccggggcctcggctgccgtggcggtgcctgcatgaagcgggtgtgggcgcctggtttgatgaggcaacgcgggcgatgtaccaacggcggttttgcgtggcgttgccaccggaggtagaggtggagcgcgcctttcagcgatacgggtacagggcagcgccaaaccgccaggcgttcgagcagcgtacccgggcctttcagatgcattttcgccagcgtgattattgcggttttctggacgccgagacctgcgccattctgtatgcattgaatgaaaaatacctgggcttgtgtggctgagctcttttcgcgaccagaggagtaaatccttcccgcgctggtgcgtttccaaaacagtgaatccgtgcgcatgcccttgggcctcacgccaacggatcggcagtttggtcaccccccaccagcgtattgagggatcgagagatgtcagtcgctaccacccgtatcgaagccccccaggtcagccctgaacctgtggaaatgctctaccagttcgaagaaaccccgctgctggcccgccaacgtcaacaggaatccaacgcccgcagttacccgcgacgtattcccctggcgcttaaacgcgccaagggcatctatgtggaagatgtggagggtcggcgtttcatcgactgcctggccggtgccggcacactggcgctgggccataaccacccggtggtgatcgatgcgatccagcaggtactcagcgacgagttgcccctgcacaccctcgacctcacgacaccggtcaaagaccagttcgtgcaggacctgttcggtctgttgcccacagcgttggcgcaagaggcgaaaatccagttctgtggccccaccggcaccgatgcggtggaagccgcattgaaactggtgcgcactgccaccggccgcagcacggtgctgtcgttccagggcggataccacggcatgagccagggcgccctgagcctgatgggcagcctggggccgaaaaaacccttgggtgcgctgttgggcaatggtgtgcaattcctgccatttccttatgactaccgttgcccgttcgggctgggcggcgaggaaggtgtgcgggttaacctgcattacctggaaaacctgctcaacgacccggaagccggcgtgttgctgcccgctgcagtgatcgtcgaagtggtgcaaggcgaaggcggtgtgattccggctgacctcgactggctgcggggtctgcggcgcatcaccgaacaagcgggtgtggcgctgatcgtcgatgaaatccagagcggtttcgggcgcaccggcaagatgttcgcgtttgaacacgcgggcatcattccggacgtggtggtgctgtccaaagccatcggcggcagcctgccgctggcggtagtggtgtatcgcgactggctcgacacctggctgccgggcgcccatgccgggacgttccgcggcaatcagatggccatggccgcaggttctgcggtgatgcgctacctgcgtgaacacgacgtggcggaccatgcggccgccatgggcgaacgcctcggcgagcacctgcgcatcctgcaacgcgacttcccgcaattgggcgatattcgtggccgtgggttgatgctgggcgtcgagttggttgacccgaagggcacgccggatattcagggccacccaccggtacaccgccaactggcgccactggtgcagcgcgaatgcctcaagcgcggcctgatcctggagctgggcggccgacatggcgcggtggtgcgttttctgccgccattggtgatcactgcggccgaggtggatcaggtggccggcatttttggccgtgcgttggaggcagcggtcgccagcctctaatttttttcgggcgttaaacgtttttacagatatcagcgctgcgcgtggcgcgcagccagcctttaagcgatggagaacagcaatgacctcagtatttgaccgcgacgacatcctgtttcaggtagtggtcaaccacgaagaacagtattccatctggccggactacaaagtcgtgcctgagggctggcgcactgtgggcaagagcggcctgaagaaagagtgcctggcctatatcgaggaaacctggaccgacatgcgcccgttgagcctgcgccagaagatggacagcgccgtacaggccaactgatacaccgcattaaactgtgggagcgggcttgcccgcgatagcggtgcgtcagtcgccgaattcgttgactgacaccccctcatcgcgggcaagcccgctcccacagaacagccctacggtgcagggttggaatagaggtaatccgtcgccaacgacgccagcgtccgcacccccaccaccagcgccgattcatccacaaaaaagcccggattatggttcggtgcggctttgctcatgtcttggtcccgtggggtcaccccgaggaacacaaacagccccggcgcctccttggcgtaaaaggagaagtcttcggcaccgcctaccaatggcccttgcaccacatcatctttggcggcccagcgcaggctcggcagcattttttcggtcagggccgggttgttgatggtcgggtcgtatttctcgatgatcgtgacctcggccttggcaccaccgctttcggcaattttctccacggtctggcgtacgtcgctgtgcagtttctgacggatgccgtagtcgtaggagcgaatcgtgccgctcatgtccaccgactcggggatgatgttgtagcgggtgccgccgttgatggtgccgatgctcaccaccgatggaaatgacgagatatccgtgcgacggctgaccacggtttgcaggccgacaatggtttgcgcacccacggtgatcgggtcgatgccgtcccacgggcggccggcgtgggtctgtttgccgaggatcttgatgcgcaggtcatcggagctggccagtgtcggccccgggcgataggcgatttgcccggcgggtacaccggcccacacgtgcaggccgaacaccgcgtccggcttgggcgccttcatcaccccttcctgcaccatcattttggcgccccaggtgtttttgccgtcggggataaagtcgctcgggccttcttcggccggctggaaataaaacaccacggtaccgggcaggcggtcgcgcatgccggtcaggattttcgcggtactgagcaggattgcggtgtgggcatcgtggccgcaggcgtgcatcacgtcgacctctttgccgaggtaagtgcccttggccctggaggcgaacggcaggtcggcgacttccttgaccggcagcgcatccatgtcggcacgcagggccacggtcgggccgggcagggcgcctttcaacacggccaccacgccggtgcgggccacgccggtttttacgtccaggcccaggtcgcgcagttgtttggcgaccagctcggcggtgcgggtttcggtgttgcccagttcagggtgggcgtgaatatcgcgacgggtttccagcagcgccggttcaaggatttttgcctgggcggcgatctcttcccgggcagtatcctgaccgttgctggcggcgatgaccgcgttgctggctaacccgcacagcgcgccaaaaacccaggggtgtgtcagaccgttcaaacgcataaaaacctctccatgtttattgttgttgatctttctcctgcacagtgccggcggtgaccacctgcacactcaagcgcggcgtggccaggtccagtccggcctcgtccaggtgccgcttgagtgacaggttgaacgcccgcgacacttcccactgcttgatcggcgccgtcttgaaacgtgcgcgcaggatggcgctgccggattcaaagctttccacgccctgaatctccagcggcgaccagatgttgcggcgctgcagcgggtcgttgcgcatcttctggccaacgtcgcgcatcagcttgatcgcgtcgtcgatttccatgttgtaggggatcgccacccggaagatcgcgtagccgaactcccgcgagtagttcttgatgctcttgatctcgctgaacggaatggtgtgcacgatgccgtcgatgtcgcgcaggcgcacggtgcgaatggtcaggccctcgacggtaccgaggtggccgccgacgtccacgtagtcgtcgatggccagggagtcttcgatgatgataaacaggccggtgatcaagtccgcgaccagcgactgcgcaccaaaaccgatggccaggccgatcacaccggcaccggccagcagcggcgtgacgttcatgcccatgttcgccagggcgacgatggcggcgatgataaaaatggtcacgaacagcacgttgcggatcagcggcatcatggtctgcgcacgtgcgttggccaggcctttgcgcgagcgggtcagggcatggtggatcgccgtgtcgctgaggatccagatcagccacgcaaacaacagcgtgccgccgaggccgaacagcttgacgctgatttcatggccatcgccttcggtgaagcgaatcagcgacaggccccagacccgcaggcccagttcgataaacaccagccacaccaccaggtgcgccagggtgtacaaaaagcttttcaggcgctcggaatacagcgcatggcgtttgtgcccgcgttgcggcttgagcgcatggcggcgcaccagcccgttgatcaccatgcacagcaccagcagcaccgtgcacagcagcgattggcgcaaggcggtgctggtgtcgccggcggacaggaaggtcgcgaacagcgagatgcacaccagcagcaatgccggcaaataccagaagctgccgatgatcgagagggtatcggtgagggcgcggcgcgtcaggcggcgcgacagcggctggttgcggatcaggtgggcgatggggcggcgaaagcgcaggataaatacgccagtggacagtgcggccattacattggccaccgtcgcggcggtgtgggccaggtgttggccgagggcctggaccagtcgcgggtcgctcaaggcttcgccaaacgcggcgaagctgccgatccaccacaatggccggaaggcctggtgccgcaggatgtacagcgcgcggtggcggtgcgggccgtccagcaccgagaaggcaatcacgcagatggccgagaagcaggtgccgaccaccaatgcatacgccagcaccatcgccagggatttgcccagcgaagagggcagggcgtagctgaggtagaccgtgatgatcagggcgatcatccacggcccgagtttgcgcagggcgaagcgcaccatgtcccaggtgcgcgggtgttgcggcagttcttccggcaggccgaaacgttcgcgcacgcggtggctgagccagatcagcgcggcggccaagaggctccacaccgcgaggatcacggcaaagccgaaaataatcggcagccattcccgcgcaggcagcatcagcgcgccaagttcatccttggcctggtcaaattcgttggaccagcgtgacagcgggctgtcggcgccggagaactgcgcttccagcccagccagcgtgccgccgatcaaaccgagtacgccttgctcggcggccggttgggctttttgcgtggcttcgcgcagctttttgaggtcggccagcaactgggtgcgttgctggtcgttttccagggtcttgatcacttcgtccagcgactggcccagcggcacgtcggcctggggctgggtcttgctggcgttacccagcaggccgggcaggctcacggcctgggcaggcgcgagcggcagcaaggtgagcagggcgatcagaaaacagcagggcagggcaaacagacgggagagcacgaggcggtcaaccttgaaaacgacgaattgaccgagtgtacgaggccgctatgccagatgcgagtgcatttgtcattccgccagtttggcgaggatcttgtaaaccaccgtgcccaggatcagcagcatgccgatccacatgccaaacacgcccaagggtttgtcacggaagttgaagccgacggcgagcatgatcatgccgatcagaatggggataagcatggcgtggaacgaggacatggagatcatggggcgacggccttgtcggagtgggaatactgacaagtttaggtcggattacaggaaatggtgttgatgtgtgtcagatggagttgggtgtgtttggaatggccatcgcgggcaagcccgctcccacagtttgatttgtgaatgcattcaaatgtgggagctggcttgcctgcgatgggttcgcctcggtctcagggcaggtcgcggctcgcgtaaaacgcgcccaacaccttcaccagatgcgccaggtcatggctgccgcacagttcacggatggagtgcatggcaaacgtcggcaggccgatgtccacggtgcgcacgcccaggtggctggcggtgattgggccgatggtcgagccgcagcccatgtcgctgcgcaccacgaagctctgcaccgggacttcctgggccatgcacaggtggcggaagaacccggcggtttcgctgttggtggcatagcgctggttgctgttgaccttgatcaccgggcccgcattgagtttcgggccgtggttggcgtcgtgtttctcggcgtagttggggtgcacgccgtgggcgttatctgccgagaccagcagggatttctggatggtgcgtacgaattcatcaccttcaggcaacaggcgacgcagggtctgctccagcatcgggccgtcggcaccgcaggccgagcaggagccgacttcttcgtggtcgttgcacaccagcacgcaggtttcgtcggtttcgctggtcagcaaggcttgcaggccggcgtagcacgacaacaggttgtccaggcgtgcaccagcgatgaagtcgccgttcaggccaatcaccgcagcgctttgcgtgtcgtagaaactcagctcgtagtcgagcaccacgtcggcgttcaagccgtgttcgcgggccaactgctcggtgagcacggcgcggaagtcgacgcgctcgtcaccggcaaattgcgcgaggatcggtggcagctcggtctgggcattgatcgcccagccctggttggcttcacggttcaggtgaatggccaggttggggatgatggcgatgggcagtttgaaatcgatcaactggctttcgaccttgccgtcacggcggaaggtcacgcgcccggccagggacaggtcgcggtcaaaccacggcgcgagcaatgcgccgccgtagacttccacgcccagctgccagaagccctggcgttgcagttccggctggggcttgacccgcaggcacgggctgtcggtgtgagcgccgaccaggcggatcccgcccagcagcggcgagtggcgaccgagcttgaaggcgatgatcgaggagtcgttgcgggtcacgtaatagcgaccgttggcctcggtggtccaggtttcgcgctcgtcgagacgctggtaaccggccgcttccaggcgctgggcgagggcggcagtggcatgaaaaggagtaggggaggccttgaggaagtcgatcaggccttgattcaacgcttcgcgcataaatagctccagacagcagtgcgcggagtttaccgtattggctccacatttgaagtgaagctgcctgcttgagctcaacacaaaaccactgtgggagctggcttgcctgcgatagcgatgtgtcagccatgtatttggcacagacagatcgctatcgcagcggtgcggcggtccgacaagccagctcccacatttgatcgggtttgcagcttaaaaaggcgccgggcactcgaagcgcaggcgctcgccgctttgcggatgagtgaagctcaacatgctggcatgcagacacaggcgcggccacgcggccagagcctgttcatgggcatacaggccatcaccgagcaacgggtgcccgatcgacaacatatgcacgcgcagctggtgcgaacgtccggtaatcggcgtcaactccacacggcaccagtcgccacaacgctccagcactttccagaaggtcagcgcatgtttgccgaactcatggtcgaccacgtggcggggtttggtcggggggtcgtagcgcaggggcaggtcgatgctgccgctgtccagtgccggttggccccaggccagtgcggtgtaggccttttcggtttcgcggtcgtgaaactggcgcgacaattcgcggtgggtgtcggcgtcccgggcaagcaggataatccctgaggtttcccagtccaggcgatggacgatgcgggcttcggggtagccgttttcctgcaggcgggtgatcaggcaatccttgttgtcatcggcgcggcctggcaccgagagcagcagggttggtttgttcaccaccaggacggcggcgtcctgatgcaggatatgaatattggacaacggcatcaaacagcctcgtaacaaacgccaacggcggctcgcccacccggttcccgcaagggatcaaggtgaccgagccgccgtggcagccgccttttcgattaacgatcaggcagggtgatattgagttccagaatcgagcagctgccgtcgttttcaagggcgacatgcacgtcatcgttaccgatattgacgtacttgcggatcacctcgactagttccttctgcaaggctggcaggtagtccggggtgctgcgttggccgcgttcgtgcgccacgatgatctgtagacgctctttcgctaccgacgcggtacttggctttttgttggcgcgaaagaagtcgagaaatttcattgtttagttgcctccaaagatacgctcgaagaatcccttcttcttgacatcgaggaagcggtgttccacggtcttgcccagcaagcgatcaacggcatcgctgtacgcctggccggcgtcgctctggtcgtcaagaatcactggaacgccctggttggaagccttcagcaccgcctgggattccgggatcacacccagcagtgtcacggcgagaatttccttcacgtcttcaacaccgagcatttcgccgttgctgacgcgctcagggttgtaacgggtgagcagcaagtgctccttgatcgggtcttcgcctttttcggcgcgctgggacttgctggccaacaggccgagcatgcggtccgagtcacgtaccgaggagacttccgggttggtcaccacgatggcttcgtcagcgaagtacatcgccaggtgagcaccggtctcgataccggccggggagtcgcagaccacgtattcgaaagtttctttcagctcggcgaggactttgcctacaccttctttggtcagcgcgtctttgtcacgggtctggctggcggccagcacgtacaggttctcaaggcgtttgtccttgatcagggcctgttgcaggttggcttcgccgttcaccacgttgacgaagtcatacaccacgcggcgttcgcagcccatgatcaggtcgaggttacgcaaaccgacgtcgaagtcgacgatgactgttttgtggccgcgcagagcgaggccggtaccgatagcggcgctggtggtggtcttacccacaccacccttgccggatgtaaccacgagaatcttggccaaggtgtttcacccctaaggaaaaaggacttttcggtccctgaaaaacatctcttggaactcgctgcaggcggacagccttgtaggaaaaataattcctacacaagtaatgccggtttcgctgtgctatcagagtctagagatgcttggaaaatgcggcagtatccgttaaagacggatgatgttcaacacatcgcccgacaggctgacttgtaccccggccccccacagcggatcacggcgcaaatcttctgaaaccttgtactggcccgcgattgacactagctcagcggtcaattgctggcaaaaaatacgggccttggtatcacccttgatgccggcgagggcacgtccgcgcattgggccgtatacatggatgttgccatcggcgagaagttccgcccccgggctgaccggagcgaccactacgaggtcgccgccctgggcgtaaatctgctgcccgccgcgtacgggggaggtgatgatccttgtaggcttgatcgtcggctccggtggtttctccggttttttcttcacttcaccttccagcggttcgagcggacgctcacgggcaccggacggcggcaatactggcagttcaatggcgatggccgcagcgatgtcttcgatacgactggcgcgaatcgccagggtgcgcaaaccatgggagcggcacacgcgcatcaggccgggcagatcaatcgcaccctggccggccggaagcttgtccagggccagcaccagcggcgcgttgttgaaaaaattcggcgccagggcgaccttggccgccagttggcggtccagggcatcgaggtcattgcgggccagctccagcacggtgatggcgagcatgctgcctttcagctggaacacgggatcttggtctagcggttcggtttggctcatggtcggcaaaagcggcttgtcacgaaaagtgtcgagacttataacgagaacatccccgggccgcaagccgagtcgatccgttgtagaatgcgcggcccttgtctttaccggaatctgtaatggatcgcccgcgttttcgtgctgcatttcttcacccgcgtttttggctgttatggctggggctcggcctgctgtggctggtcactcagttgccgtaccgggcgttgttgaccattggtcgcttactcggcgcgggcatgtaccgtgtggccggtgatcgccgccgaatcgccgcgcgcaacctggaattgtgcttcccggaaaaaaccgcccaggaacgcaaacgcctgctcaaggagaactttgcgtccaccggcatcgccttttttgaaatggccatgagctggtggtggcccaagccacgcctggcgcgcctggcccacgttgaagggctggagcacctgaagcaggcgcagttggacggcaagggcgtgatcctgatggccctgcatttcaccaccctggaaatcggcgcggcgttgctcgggcaaaagcacaccatcgatggcatgtaccgcgaacacggcaacccgttgttcgatttcatccagcgccgtggccgcgagcggcacaacctcgattccctggcgatagaacgcgacgacgtgcgcggcatgctcaagttgctgcgcgccggccgcgccatctggtacgcacccgaccaggactacggcgccaagcaaagtatcttcgtgccactgttcggcattcaggccgccaccgtgaccgccaccagcaagttcgcgcgcctgggcaaggcgctggtggtgccgttcactcaggaacgcttggcggacggcagtggctatcgcctggtgatccacgcgccgttggccgatttccccggcgaaaccgacgagatcgattgcctgcgcatcaatcagtgggtcgaggcctcggtgcgcgagtgccccgagcaatatttgtggacgcaccggcgcttcaagagccgcccgccgggtgagccaaagctttacgaaaaacgccgtcgataacacccacctttctccacatggagtgacgcaatgcgcccagctgaaccggttacagggttgattctttccggtggcggggcgcgagcggcgtatcaggtgggggtattggcggcgattgccgagttgttgccgccgggggctccgaacccgtttccggtcatcgtcggcacctcggccggcgcgatcaacgcggtgagcctggccagcggcgccatggacttcaccgccgccatcgagcgcctgactgcattctggcagggctttcgcagccatctggtgttgcgcagcgattggccgggcgtggtgcgtcaagccagccgtttcttgacccacagcttgctggggtttggtgcacaactgccggtggcgttgctcaacagctcgccgttgcgggatttgctgcgcgacaaactgcacctggaaggcatagacgaggccattcgccagaaacagctgcatgcggtggccgtcacggcgttcggctatgagtccgggcaagcggtgaccttttatcaaggcggcggcaccatccacccttggctgcgtcatcgtcgaatcggcgtgcccacccagctgaccgttgagcatttgctggccagttcggcgattcccttgttgtttgcgccggtcaaactcgatcaggaatatttcggcgacggtgcggtgcgccagtcggcgccgatcagccctgccttgcacctcggtgccagccgcgtgctggtggtgggcgtcagcggcaacccacggggcaacgagccgtcaacccagcgcacctacacgggccaggagccgacgctggcacagatcggcgggcatatgctcaacagcacgttcatcgacagcctggagagtgacatcgaattgctggagcgcctcaaccagttcagccatctgttgccggccgatgctgccgtacagggtttggcgccggtggacgtgctggtgattgcgccgagccagccgatcgatgaaatcgccgcacggcaccggcaggaattgccggcggcgttgcgtttgtttttgcgcgggccgggtgcgaccaagactagcggggcgggggtgttgagttacttgttgttcgaggcggggtattgcagcgagttgatcgagttggggcggcgcgatgcgatggccaaacgtgaggagttagtgcgatttctggggctgtccccgatctaaatgtgggagctggcaagccagctcccacaggagagcagcagtgtcagttagaagtggtatttgaccaacaggctcgcggtgtcctgattggtctcaaacgcaccactgtcctgaatcccgtacttgttcttccagtagtcgtattcgatacccacatacaactgcttgtcgccccaatgcagcgccttgcccaggtcatatttgatctgtgggttgaagtgcaggttggcgtggtaagtgccgcgggcgttcttgtcgttgtcgaccacccagtccatgaaaccgtcgatcaacacgttggagttgccgacaggaatggtgtacgaccacaccggcgtgatctgccacacgccgtcacccgggcggttgccctcggtctggcgctggtagaaattcagctggaagtagtcgaaacccggaatgttcaggtcaaagcccgggcccaacaggtaggactcgttatcgccctcgccgaactcgtaagtgaaggccagcaatacatctttgatcgggccgaatgagaggtctgtgtcgaagatcttgccaaacgacaagcgcgggctgatttcgccgtagtaggtgctcggcccgacgttgccgtcttccttgccgttgtaaaagatgcggtcgacgaagataaagttatcgccgtacttccatgcgtcagcatgctcgaaggtgacggtttgctggatctgcgggttgacggtgaagttcttgccccacagataggtcaggctgttgttctgccactgcaacaagtcaccggccacggcttggccgccagccagcagggatcctgccaacatcaggcctttcaacataggtttcattcggttgctcccgagtcaaatttttagggttgttgttctacgcaggcgctctggtgtggcgccttttggttcgctgcaaaaatcgtctgtttggtcagctttaatgcttttagcaagagctgcgccaaggtgttcaaaaagccaataaaacgccttcggctgcacttgatgcagtcgaagccagaggtgttttgtgcacattggccgcagacatcgggcccggataagttggccctgcagtcagcttttacattcgctgtttttttttgagtcgattcgagcgggcgcggagaatactggctcccaggccttggctcaagtgcgctgttagagagcgcgtggggcgagaatggggcgcagcttgtggccggccccgggtggatggcgtgcatgtgggtgtttcctgttcgttattgtttttgttgttgttggataacgggcggaatcaatgcgtgtgtgcgacggcggggcgttcggagccgccaaggatgttgaagagtatgttcagcgacaatgcgctgagggtggccatggcaatgccgctgtgggtaatcgggctcatccaaagcggcagctgcgcgaagaattcggggcgcaccaccgggatcaggcccatgccgatgctcaccgcgaccagcaactggttgcgccggtcggcgatgtcggcttcctgcaggatcttgatgccggtggccgcgaccatgccgaacatggcaattgccgcaccgcccaacaccgccggcgggatcgatgccaccaggaatgcagctttgggcagcaggctcagcacgatcagaaaggcgcccgccatgatcgtcaccgagcggcagcgcacgccggtcatctgcaccaggccgatattctgcgcgaacgaggaatgagtgaaggtgttgaagaacccggcaaaaaacgacgcgccggcatcacacaacaagccacgacgcagcattttcggggtgacgtcctggccggtgatttttcccagcgcgaggaacatgccggtggactcgacaaagatgatcaccaccaccaggcacatcgacagaatcggcgccaactcgaacgtgggcatgccaaagtgcagcggcgtcaccacctgcacccacggcgcctgtgccaggccgctgaggtcgaccatgccgagcaggccgcacagcaggtagcccaggcccatgccgatcagcaccgagatgttcacccagaagccgcgcatgaaacggttgatcagcaggatggtgcccagcaccagtgcggcaattgccaggtacaccggcgagccaaaagtcgcggcagcgctgccgccaccggcccagttcacggccaccgggaacagtgaaaggccaatcgcggtgatcaccgtgccggtcaccagcggcggaaagaagcgcacgaccttggacataaaaggggcgatcagcatgccgaagaacccggcggcgatggtcgcgccaaagatgccctgcaagccgataccgggcatgccggccatggcgaccatactgccgacggcggcgaagctggcgcccatcatcaccggcatacggatgcccaccgggccgataccgaacgactgcaccatcgtggcgatgccggccaccagcaggtcggcgttgatcagaaaggcgatttcttcacggctcaagccggcggcctggccaatgatcagaggcacggcgacggcaccgccgtacatcagcaagacgtgttgcaggcctaccagaatcagttgcaagaggggcagccgcaccatggcgggcgcggcaggaatctgcggttcggctaactcggtcatgcaacacctcggatcttttttattgttgtgttgttcggcattcaattgccgggtggaactcaatcttcagagcaacgctgatctcaattgtggaagctggcttgtgtgggagctggcttgcctgcgatgcaagcgcctcggtgcatcaggtctaccgaggtgatgccatcgcaggcaagccagctcccacacaaagccctcctacctatgagcgggagcagtcagttggtacgcgccccctgattgatccaggtgccaatcaaatcccgctcctgctgggtcatctgggtgatgttgcccaggggcatgatctggctggccacggcctgcgcttgaatgcgcgccgcctgctgctggatctgcgccggggtgtcgaacatcacgcccgccggggcggtgctgaacagcgggctggtgggcttggccgagtggcacacggcgcagcgctcctggatcacgccgtgcaccttgtcgaaatcaatcgaggcctgggcaggcgccgccgcaggtgcggcagccggttctgcgggcgcggcaggtttcaagccgccacccagcgcggtttccggcaacggctgatactcgatggccgcaggggccttggccacttcggcgacgggtttggggccggtcacataggccagggtgatcatcgccaacgcgccgaccggcagcgtccacgcgtatttctggctgtcgtgacgggtgttgaagtagtgccggaccaacaccgctgcgaccgcgataccggccaggattaaccagttgtattggctgccgtaggtgctcgggaagtggttgctgatcatgatgaacagcaccggcaaggtgaagtagttgttgtggcgcgaacgcagcaaacccttggccggcagtgccgggtccggcgtgcggttctcggcgatcgccgccaccagcgcgcgctgggcgggcatgatgatgcggaacacgttaccgaccatgatggtgccgattaccgcacccacgtgcaggtaggcgccacggccgctgaacactttgctgaagccgtacgcggcggcaatcaacagcacgaacaggatgaaaccgagcagggcagggcgtttgcccagggccgagtcgcagaggaaggagtagatgaaccagccggcgaacagtgagccgatgcccagcaatacaccttccgggccactgaggctgctgcccggagccagcaggtacaaggtcgggttccagtagaacaccacgcacagcagcgcaatgcccgacatccaggtgaaataggcttcccatttgaaccagtgcaggttgtccggcatggttggcggggccagtttgtatttttccaggtggtagataccgccaccatggatcgcccacaagtcaccggccaggccgctcttggggttgacgcgattgaggttgttttccagccagacgaagtagaaagaagcgccgatccacgcgacgcccgtgatcatgtgaacccagcgtacgctcaggttcagccattccatcaaatgtgcttccacagtctttacctctcgcctgtcaccctgttgtcgggtgatcagaccttctcttattggtggggggcgaggatcaaacgctcatcctctttgaaaaaatgctcatcgcagttattgcctgtgccactgcgatcaaccaccaggaagtcatcccgcttttcgatcgtcagcaccgggtggtgccagacgccgcgatggtaattaatgccctgcctgccgttggtgacgaaggcgcggaccaagcctgatacaggttcatcgccaagtggcgcgaccacgatcagaaaggggttgccgagcagcggaatgaaagcctggctgcccaacgggtgtctctccagcatgcacacggtcagcggcatgtcctgcgcgtcggcgcggaaaatgctgatgatcgcgttgtcttcaggcgtagcggtctcgaccgtggccaatttgtgaaagcgcatggtcgacccgttgttgatcatgaagtgatcgctgccatcggtttcgataacgtctccgaaaggggcgaaggcttctttggtcaggggttcgatcacgagtgtgcgcatggctgtcttcttatccggtttctgtgttgtttgatctatcgtcatcgcgggcaagcccgctcccacagttggaatgcattcccttgtgggagcgggcttgcctgcgatggcctcaccgcttatttggcaactttacccaggacacgcaggcggctcacacccccatccgggaacacgttcaggcggatgtgggtgatggggcccagcgccttgatctgctcggcgaagctgtgttcggcgtgcatttccagcttctgcgtcggcagcagttcgcgccagaacagcgattgggtttcgatctggctgtcggtgccgcctttcacgaacgcgccctgaatcgagcaggtgtccgggtagttgcccttgaagtgcagggtgtcgacgatgatcttctcgatctcgcccgggtggcccagcgccacgatcacccagtcattgcctggcgtgcgacgacgcgcggtttcccagccgtcgcccatgttgatgccacggcccgggttgaggatgttgctcatgcggccgaagtgttcatcggagcacgccagcgcgcggccgccgttgagggccgaggccaggtcgacttgctcgttgtcgccaatcgacgaccagtcgcggaacggaatgccgtacacacgcagacgggccacgccgccatccgggtagatgttgaagcgcaggtggctgaatgcctggtcgttgctgatttcgtggtagtggtggctgttgccttgcagctcgacggccgacagcacttccacccactgggtattttcgtcagggtcgccggaggccaggaagcaggcttccagcgatgccgacggcggaaagttgccggtgaagaatgaagtgtcgatgtccacgcccttgatcgagcccggcacgcccaggcgaatcaccgcgctgtcgtagccttcgaagcgcttgcggcgcgactcccagccgtccatccacttgccgttgtcatcgaaaacgccctccttccacacggccggggtcggctggaacaggcggttggcgtcagcgaaccagtcatcggtcaccgaaaggatcttggtgcccagacgcgcgtctgccaggttgacgaacttctcgaaaggtacggcgtaagctttcattcttcttgtctgccttgaattgagtggcttgggatgctcgccaggccctgggtgctcatgaacactcgggcgaggcttgcttatagagtcagtaaacgaaacaacgcgatcttgttgatctcggccaatgcgcatttgaactcggcgtctaccgagttgtgaatacgcgtttcaaacgccgccaggatctggtgccggttgctgccttttaccgccatgatgaagggaaacttgaacttggccttgtaggcatcattcagctcggtgaagcgcgagaactcttcggccgtgcattggtgaatccccgcgccagcttgctcatcggtgctggcttgggtcagttggccctggacggcagctttgccggccaggtccgggtgagcgttgatcagggccagttggctggcatgatcggcgctcaacaggatgtcgctcatgcgctggtgcagggtttcgatttcatcaatcgaaggatcctggcccaggtcgaaggccttttcggctacccatggcgaatgttcgtagatgtcggcgaaggcagcgacgaatgcgtcgcggctcagggccgagggtttcagggtctggaatgcagtcatttggccgctcccttgaacgggtgggtttcgtgccagtggcgggcaatatcgacgcggcgcgtgaaccacacctggtcgtgacctttgacgtattcgataaagcgcttcaacgaggcgaggcgcgccgggcggccgatcaggcggcaatgcaggccaatcgaaagcatcttcggcgcctcggctccttcggcgtacagcacgtcgaacgcgtccttgaggtattcgaagaaatcatctcccttgttgaaaccctgcacctgggtgaagcgcatgtcgttggtgtccagggtgtaagggatcaccaggtgcggcttgccggtcgggttgttcggttcccagtagggcaggtcgtcgtcataggtgtcgcagtcgtagagaaagccgccttcctccatcaccagccggcgggtgttcgggccggtgcgcccggtgtaccagcccaatgggcgctcgccggtgagctcggtgaggatgcggatggcttcgagcatgtgctcgcgctcctgggcctcgtccatatactggtagtcgatccagcggtagccgtggctgcagatctcgtggccagcctcgaccatggcgcggatcacatccgggtggcgctgggcggccatggccacggcgaagatggtcagcggaatatcaaattccttgaacagcttgaggatgcgccacacgccggcacggctgccgtattcgtacagcgactccatgctcatgttgcgcgcgccttgcaacggctgggccgagaccatttccgagagaaacgcttcggactctttatcgccgtgcaaaatattgcgctcgccgccttcttcgtagttgagtacgaaagacaacgcaatgcgcgccttgcccggccagtgggggtgaggagggttactgccgtaaccgatcaggtcgcgtgggtagtcagcgctcactgcagtcttccttcttgttcgtgatgattcatgtggcggccgggcagcaaaaggactgggtggcgtcacagcgatgagtgattgtatacaacttatcatcgactttgtaagcctgcatttctgcattttttccttggcaccgtcagtaaagggtgtagcaagaaacttgcctgactggtcagcaaatggataaaaggtcgtttaaaagcaaggattactcgtcgatcagcccttcgaccaatgtcgaggggggcatccacggctttgtgatttttattgtgtacaatttttttaaaaagtgtcttaatcagccatcgccggcttttttgatgccctgaaaaagtgcggacctcttatccattgacttcgggaggcgcgtagacgccatgggacgtttgaccacacacgttttggacgccgcacacggctgccccggcagcgccatcaaggttgagctgtaccgcgttgaaggcctgcagctcgagctggttgccagcgccgtgaccaacagcgacggccgctgcgacgcgccattgttgcaaggcgatgattaccgcagtggtgtgtaccaagtgcaattcagcgccggcgactactaccgcgcccgtggcgtgcaattgccggagcctgcttttctcgacgtggtggtattgcgcttcggcatcagtgccgaacaggaccattaccatgtcccgctactgatttcgccttacagctactccacctatcgcggtagctgagcgtcacctcgcttcacacccccaaagctcttcgttggttttttgcccgcccacactgcgggcttttttttgcctggcgtgggctcaattatctagtgccttttgagcgcgtgcgctgcataggctgagtgttttcctcgttgagaagaaagcacgatgagcccgccccccgatatcgatgcaccagacgccgctgcagaagccgcgtcccaggaaattcgcaaccagctgcaatggcgaatcaacgcctgtgcccatcccagccgcctgatcaatcagattgctgtggccgacttgcgttgcggcgagggtgcgcaggcgctctcccatctgatagggcgctcgcctaaagtcttaagcgtgattcgcgccgaactgcgcaaagcgtttgaaattgacccagacagcctgttgtttaccgagcccaagccgccggcggcgccgcaaaaaatcgacacgctgactgaccgggcgttgctgtttctggttcggccctcggtggtcatcaacctcaaccaatttacagccctgagtgtcaagggagattccggccgtcggttgccctataccccgttggaagtcatgcaacgggttatcgcgatgaacctctgggaccggctcgctcgtgcaacatccaaatattgggacaccctggcagagggttcctggctcacgcgtcgggagcgctgggtggagttgcacacgcagatgtttgctgaccgagcctttgtggcacggcaactggacgagctatcaagtgtgggaacggtcatggtcaacgcggtgatcgatgccccgactacacaagcacgagagcgagcaggtggtgattgggccaaggtgcaagtgagtcagttgatgtggccgggaacgcccgcagtggcgatccccggtgcattgcacatttatcgagagggcgaacccgcagatgtgccccatgtgatttacctgccgggagtggtgcgcaatttttacgaatacccgaacttcaccgccctccaatgcggcctattggcgctgggcagtacacgctttcaggacctctggcagtgcctgccgctggatcggcgcaacgcactatgccggcccgcagacctggcccaggccgtcggttttgctcgcggcccgcgggtgacaggcgacgccttggcgatgggcgccgaggcgttgttgagtgggcaatggagtaatgagttggcctgtgccgtaaagattaatcaggcgcatgtgttttctacagagcggcccaggccccaaccgctggatgcggtgcgttttctggctcatgtcgaggcggccaggaagcaattggttggcagcgcccggctcggtcttatccgcgatcaattgctcaaatgggactatcagcgacgcagcgctgatattgtcttcgccagcatggcgccagggttggccctgctcacactggagcatcaggttgaacgctacgaaaaaggcttggttgcgttgctggctccggatgacctcagtgtgctgacgccggcgtacagcgaggtcctgtcgctgatgagtcaattgaaggttcatgcaaatacgttgaaacggatgatggcggatgcactgcaacgctcgcttgatctggttttttgggccgagcgccccggcgggacggggacgcccaggcgtgtttcattgtttatggccgcccagaccgaggccctgcgctgcgaagttcaaatgcaacaccgccttaagctgctcggcaccgcgcatcgagacctgatgatcgaggtgctggaacagcctctggcctccaggcgttcgggcagcgaaacccgggtgctgtcaattgcggtcggcagtgagccagacgctttctacccgttgcataacgtgtgggtggtgaccacggcagcggccgtgagagtgcccacccgccaccatcctgtgattgtttatgcgtctggcgtggagggcggggtgttggcgttttccgggctgcaggcattaaccaaaggcatcaaggcgagcctgagcagccgcgacgattcggtgctgtggggctgcatagaacgcgataaacgccgcgacctgcgcgtacatgccacgcatcaaacgttgggcgtgcgttacgttgatatcaagggtaaacctgcgctggcttctctcaagaaattgctcggaacctaccaccgtctgtacacaagtagagaagacatcacgcgcattttcagcgaggtgaaggatgtgcaattcagccgcgcgctattgatgctggagctggaggaccggctgagggttcctctcaataacgccttgagtcaggctcaggcgaatgttgaattgctgagaaaaactgcagcgcaggcgaagaacctcccggcgtggctggtgaacgcaacacgtgcccagcgtaaaaaattcaggcgctcacagcgtctgtacctgagcggtgcgtttgcatttgtcagccggctcgaacaacgcctgcccgattttggcacgttcgcccgcgatgcgttggtcgcccgtttgagccgcgacgctatccctgcgcagtgggctatcgacctgccatttattgagatgcccgatgatgttcacgaccgattttgtgggtgggaaagtgtgtgtgcccccggtgatcgcaatcggctattgacccctaccgctgagcgcacgaccttcagcctgatgcagctggcgttgcataacctcgaccccctggcgccctggacgaagtggcgtttgaaccgcgcgcgatacctgcagcctgactggaaacagcggctgaacgccgattatctgatttctatggtgtccaccctggatctgggtggccagtacgatgcattgatcaacagcgttttttttgcgcgcccccacaccgatcaaacgcccagtgaaagccgggtacccgagttatggaatcgcacgttaaaagcgggcttcaagcatcatcttttttcggcgaatcagcaggggttgtcggcaggtgcgcgcagcgttttcaagacagcaatggcggcacgtacgccccccgacttgttgaaataccagcaccagttgcagctgtatgtgcttcatctggtagggcacaccatgcagcatgaccgctacatcgccggcataatggtggtgcaagacaagtgcaccgggctgtgtgtggtctattggcccgaggcgccacacgcgttggtgttgaccgaatacgccagcctgcaacaggcccacgatcaattgaaccggctgggcgcgctccctgaaaacgtcaaggcactggcacggcaagttgctccaggctgggcatttgaggcaattacccaccctgccaatagtgtctcaccatcgggtggggcatcaggccccctcgatgtcatcggtatgtccatcgtgaacggggtttggcgggctcgcgaatttatccgctcattcaatatcaaacatctggagcctgcggcgcggctggatgaaattgaaaaagtcatcatcgagcagattgccagtgaaccgctgaactggctggctctggtcgccacgcgccacagtaacgctcaggcattgctttaccgcgccgccgtactcgacctgcagcgccgaactcaagaggccagtcgctccggcaaggagttggaaaaatacaggcttcgccgtttgagtgaggacagcgatagccgcaatcgcaggatagttgggtttttctcgcagtttttctttccgttgttcgcactcttgaatgatgcctatgagctcctgctcgtggcgcgtcaatatcaccgctttggtgacccgcgtgatgcagtggacgtgggttttatgaccagctttttggcaatagacctgctactgaattttatcccgggccctggcaaattaggcgcgggcgtggcccgtggtgtgcgatcggcgccgagggcagccttgggccgcttacaccgtctgcggatgatgcctcaaggtgcaaacccgcgtttagcgttgccccgcgtcattcaaatgaaagccttggaccgtctcaaaatcaagggtgtgccagagggtgctgtggcgttgaaagggccgggggatcgaggcgtgtacgtcaaaggtggcgagctatttgtgtcggatggcacgcacatttaccctgtttatcgacgcaacaacgagcagtcgtttcgcctgaaaaaccaacaggtgccagggcaggacgaattgatcctgaacatccaccaacctggagagtggttgctgggagcggacgctgctcagccggtagcgggaactagctcgggcgtgctcaacccgtggcggctgccggttccatcaccagcggattggcgcccccccagcgtgcgcattgccacgcaaaacagaattcttcaatcaaccacgacggcaacccattgggcggggtggcgtattcaagacccgatgacgtcaccgttggcctctgttgcccccgggatatttaatgtcccggcggacgcccgcgggttgtcataccaagcccttcgggtagctcccccaagcataaacagcggctactacatgctgcttccccaaggcgatcaagcgccgttgaacggtattgtttttatcaaacagtatgggccggcagctcccttggccgacgtggatctatatcactggacaagtgtggggatgggagaccagcccatcccggtgtcacgcaccttgatgaatgactgggcgctccatgcgccattgttcgacaggacgctgatggattacgtggctgaggtttttcccaccatgacgcgtcaaagccggttttcgactgtcgcaaggctggttgagttgtcaggacccccaggtccggcaacggccactcacctgctcaatattcgtgcgacgttggacaactggttgtctgcccctccagtgatgtttgcgcaggcggatgatttgctgaggatgttgaagcccatcgagagacgcagcggaaaaacctttatcggtttcaatggcaggctgggctttattcgcgtcgacttcgaagtgcgaggattagatccttcgctgtggctcaatggcgccgggattgcagttgccagagacggcgcgcagcgcgtggcagtcagggaggtgctgactcaacagggatttgacgtgcgggaagtcacggttaaacgaggcggtattctcaagcatgagttgatagccatccaccctatgaacccttccaatgtttactacgtgtccctgcagtggcttgaggcgggctcgtttacgttgaacagccggctgaaggatcactggattgaaaccgcaattaagcaacccgcaaatgttgttgcgtccgcaggcgcccgtaaagccatgaaggaagggcgcctggttcggatcattgcaggcattcaatggcctgtttcaggaaatgttgaacccagtgtctattttgtcaaagtaagcccgaccgggccttgaccagtgccgcgaggccggcgccgccgaacagccccgcgctgatgcggttaaaccaactctgccccttgccactgcgcaaatagcgcgcagcgccatgggcgctcaggccgtaggccaacttgcagagcagatcaagtacggtccaggtcgcaatcattaccagcaactgcggcaaaaatgcctgctggctgttgagaaattgcggcaggaacgcggcaaagaacagaatgtccttggggttgctggcgcccagtaaaaacgcacggccaaacaaggcgcgaaagcggggcgtggttgcaacctgcgggacttcggcgccatgagcgggctgccgcgattgctgccagctttgccacgcgaggtagaacaggtacgcggcgccgacaattttcaaggcgctgaacaactgctcggaagccagcagcagggcgcccaggccgagggccgaggcgctgagcaagcagatcgaggcaaataccccgcccagaaacgctggatacgaacggcgcaagccataattgaggctgttgctgatcatcaacagtgacagcggtccggggatgaggatcaccaccaatgccgcgccgctgaacaatagccaggtttccaggttcatccgttactcctttatagaaatatgaatttggcgataaagatcgcgcacaacacccacaggctcacggaaatctcacggtacttgccggtgccggccttcagtgccacatacgtgataaagcccaaggcgataccgtccgccaccgagaaggtcagcggcatcatgatcgcggtgacgattgccggaatgctgtcggtagcctcatcccaattgatgtgggccatgcttgccatcatcagcatcgcgacataaatcaacgcacccgccgtggcatatgccgggatcattcctgccagtggtgcaaagaacatcgccgccacaaacaggatgccaacggtcacagcggtgagcccggtgcgcccaccggcagccacgcccgcagcactctccacgtagctggtcaccggcggtacaccgaccatggcgccaaacacgctggaagcactgtcagccttcaaggcgcgggacaggttatcgatcttgccatcggcgttcaccagcccggcccgttgcgcgacgcccatcagtgtacctgcggtgtcgaacatgtgtacaaaaagaaaggcaaataccacgctgatcatgctgacattgaatacacccttcacgtccatggccatccaggtcggtgccaggcttggaggggtggagagaatgccgttgtaatgcaccaggcccaggccccaaccggcaagggtcacggcgatgatgctgatcaggatcgcgccgaacacgcggtggtagctgaggatggcgatcagcaggaagcacacggctgccagcaatggcgcgggttcatgcagggaaccgagtttgatcaacgtcgccgggctgtcgacgatgatgccggcggttttcaggccgatcaccccgaggaacaagcccacacctgcgcccatggcatggcgcaggcttaccgggatgctgttgagcagccactcgcgcacccgcgacagggtcaggcccatgaacagcacgccggaaataaacactgctcccagcgcggtttcccagtggtagcccatggtaccgaccacggtgtaggtgaagaaggcgtttaagcccatgcccggcgccaggccaactggccaattggcgtaaaggcccatcagcaggcagccgagtgctgccgctatgcaggtggcaacgaacgccgcgccatgatcaatgccggcgtcggccatgatgttcgggttaacgaagatgatataggccatggtgatgaaggtcgtgaggccggcgatcagttcggtcttcactgtggtgccatgcaaactgagtttgaacaggcgttccagccaactgttgttgggccgggctatttccagcgtaggggcttcggatttgcggctttccacagcgagtactcctcaagagttttattgttatttccagcgccggtcacaaaagtgggcaacagcgctttgagggattggcgggttttgttgaccaataggtcaggaactcgcacgcagtggattatgcttttgtatacaaataaagcaaataatgttttcgattgtgtgggcgaaaggagataaaaggctagttcacagcactcagtgcctgattcactgccagccatcccgccacggcttcctccccggcatctgcgaaggcgcgctgcaacaatttcacctgttcacggcgtagtgagtgctcgaaacgcaggccttcttcgctcagttccagcaagcgtttgcgcttgtcggtttcggacgcgacgctgttgaccaaatgcatttcctgcaattggcgcaacggcatgttcagcgcctgcttgctcacgccgagcaattccagcagttctttcacgctaagcgcggggtagcgtgcaatgaaaaacacgatgcgctgatgcacacggctcaagcctcgacgctcaagcatctcatcggccttggcggtgaacgcctggtagccgaagaagaatgcttccatggcttcttgttggtgggtcggatttttaaggtcaagcatattgacgtatccactgaagtcgtcgtaatttcggtcaaccagtttgacgtatttcccacaggcttcgctaccggtgaccttatggccttctccgaacgtgttacgcgcctcaaaagctctttgatccgtgaaatcctcgcggcggcccagcgccccgaggtgatgtcgtttgccggtggcctgcccgccgaggccatgctgccagcgctgaactgggatgatatgccgctgaacatcggccagtacggcatgagcgaaggcgaaccgcagctgcgtgaactgctcgccgccgaggcgcgcgccttgggtgtgccgtgtcaggccagccaggtgctggtggtcagcggctcccagcaaaccctggacctggctgccaagctgtacatcgacaaaggcacgcagatcttgctggaaggcccgacttacctggctgcgttgcagattttccagctgttcggcgccgattgcctcaccgtgcaactggaggccgacggcccgaacctggccgcgctgcgtgccagcctcgaacgccatcgtcccgcgttcatctatttgatcccgaccttccagaacccgtcggccgtgcgctacagcgaggccaagcgcgcagccgtcgccgctttgctcgacgagttcggcgtgaccctgatcgaagacgagccctaccgcgagctgacgtttgacggcggcagtgcgcagcccattgccgggcgcctgaaaaaagccagttggatctacaccggcacggtgtccaagaccctgctgccgggcctgcgcgtcggttacctgattgccagtcccgacctgtttcctcatctgttgaagctcaagcaatcggctgacctgcacaccaatcgcgtcggccagtggcaggcgatgcagtggatcggcactgacacctatcaacaccacctggtgcaactgcgcagtttttaccgtgagcgccgcgatgcattccaggcagccctgcagcgccattttgccgatttggccgactggcaaacgccccagggcggattattcttctggctgaccttgaaacagccgctcgacacccgcaccttgttggcgcaagcgctggatcaaaacgtcgcgttcatgccgggggaaccgttcttttccgagccggaccgtcatcttggttcgttgcggctcaatttcagccatatcgacccggcccgcctggacgaaggtctcaagcgcctggccgcggtggtccgtcaagcacagcacgcgagagcggcataaggggagcctcatgtacaaggtttatggcgattacaagtcgggcaactgctacaaggtcaaattgatgctcaacctgttgggcatcccgtatcaatggatcgacgttgatatcctcaacggcgacacccagaccgcagaattcctggccaagaaccccaatggcaagattccggtactggaactggaagacggcacctgcctgtgggagtccaacgcgatcctcaacttcctcgccgatggcagcgagtttctgccgaccgagccgcgcctgcgcactcaagtgctgcaatggcagttcttcgagcaatacagccacgagccttatattgcggtggcgcggtttatccagttctacctgaacatgccgcaggaccgcctggaggaatacaagacttgtcataagcgcggttacaaggcattgaaggtgatggagaagcagttgcaagccacgccgtacctggtgggcgagcagtattcgattgccgatatcgcgctgtatgcctacacccacgtggcccatgaaggcggctttgacctggcgccatacccggccgtgcaggcgtggctggcgcgggtggccagccatccgaaacacatcgcgatgctgggttaaacgcatctccgactctgtgtgcgggcttatgtgggagctggcttgcctgcgatggcttcacctcggtgtatcagttacaccgtggtgaggccatcgcaggcaagccagctcccacacaaagcagcttcaacatctagctgggtgttgtgtcatagagttcttcgcccagcaggtcgaagcagcgctgtgccgccgggctcaggcccatcccgctacgactgatcaatccaatctcccgattgacgcccggatggtcgatcgcgatccgcaccaacccctccaaactgtccgccgccgactccggcagcacactgatgcccaacccctggcgcaccagtgccagcaccgtcgacatgtagttcgcctccatccccgcgttcatcgtcaatcgcgtctcatcaaacaacgcatccacctgctcacgcacgctgctgtcgcgcccggtgaggatgatcggctggtctgccagttgttccagggtcaactggcgatagcgggtgagggggtggttcagcggcacaaatgcgcacagtcggtcgttcagcaccggtacaaattccagcccgtggctgagccgcgcacgcacgccgatgccgaaatccacttcaccggagcgcacctgagcatgaatgcgatgggccaccaggtcgtgcaggcggacttcgataccggcaaaacgctcgcgaaacaagcgcaaggccgggggcagcgcgccggcgcacaccgagggcagggccgcgatagtgaccacgccccggcgcagggcggcgaggtcgcgggagccggtgacgatgttgtccaggtccagcagcagtttttccatcgggccgcgggcgtcctggccggcggcggtgatgctcacgtggcgcgggctgcggtcaagcagggcgactccgagccagtcttcgagttgttgcacctgcacagtgagtgcagagggtgaaaggtgcagttcgttggcggccttggtaaagctgcccgtgcgggccaccgcgaggaacgcctgaatgtgctggatgctgttcttcattttgtttttccgaacatgatcggctgaatattccaatttacaaagactacctcgcttccaatactccagggaaaacaataaccggccacaaaggccgctctggagtaacccatgctcgctaccctgggtgtcatcaccatcctgtgcctgctcgctgccgtcatgagcaaacgcctgtcgccgctggtggccctgatcgccttgccgatcatcgccgcactgctcggcggattcggcctgcagaccagcgcctttatcatcaccggtatcaaaaacgtcgcccccgtggtgggcatgtttgtgttcgcgatcctgtttttcgggatcatgaccgatgccggcatgcttgaccccatcattgatcgcatcctgcgcacggttgggacgcgtcctacgcgaattgtcgtcggtaccgcgaccctggcgttgctggtgcacctggacggttccggcgcggtgacgttcctggtgacggtgccggcgatgctgccgctctatacgcggctcggcatcgacaagcgcatcctcgcctgcgtctgcgccatggcggccggggtcaacttcctgccgtggaccggcccgttgctgcgttcgtcagcggcgttgcatgtacccgtggcggatctgttccagccgctgataccggtgcagatcgtcggcctggcctttgtatttgcctgcgcctggtggctgggccgtcgcgaagaaaaacgtctgggtctcggtgccggttcgaccgtggacgcggtaccgcagcgggtactcagcgatgaggacatcaagctgcgccgcccacggttattctgggtcaaccttatactcaccgtgttggtgatggtggtgatgattgccggttgggtcgacccggtggtgatgttcatgctcggcaccgtggtggcgctgtgcatcaactacccgaacgtcgacgcccagcgtgcacgcatcgacgcccatgccaaaactgccctgaccatggccagcatcctgctcgccgctggcgtgttcaccggcatcatgcagggcaccggcatgctcaaggccatggccgaagtggcggtggcgcagattccggccggtcacggcaagctgattccggcggtggtgggctttatttccatgcccctgagcctgctgtttgaccccgattcctattatttcggcgtgatgcccgtgattgccgaggtcggcaaagccctgggcgtcgaccccctgcaagtcgcccaggcctcgttgttgggcgtgcacaccaccggcttcccggtcagcccgctgacccccgcgaccttcctgttggtgggcttgtgcaaggtcgaactggccgaccaccagcgcttcaccatcccttttctgtttgccgcgtcggtgttgatgaccctgaccgcgttgctcctgggagtgttttgagatgaaaaccttgcgcatcggttccggcgccggctattccggcgaccgcattgaacctgccgtggaattggccgagcagggcgatgtggattacctggtgttcgaatgcctggctgaacgcaccatcgccctggcacaacaggcgcgtatcggtgatccgcaaggcggatatgaccctctgctgagcgagcgcatgcgccgtgtgttgccatttgtgggtgaacgtgaaggccgccgccgtttgcgcgtgatcaccaatatgggcgcggccaacccgctgtcagcagccattgaggtacgtcgcgtagccgatgacctgggcctgagcctcaaggtcgtggcggtggtgggcgatgatgtcctgaaggttttgcagcccgaacaggtgcttgataacggtcaaaccgtcggttctttgggcgagcggctgatttccgcgaatgcctatctgggcgttgaggggattattgaggctctgcgcgccgatgccgatgtggtcatcaccgggcgcgtggcggacccgtcgctgttcctggcgccgcagatgtttgagttcggctgggcggcggatgattggctgcggctggggcgcggcacgctggtcgggcatttgctggagtgcgcggggcaggtcagtggcggctatttcgccgatccgggtttcaaggatgtggatgacctggcccgcctgggtttccccttggccgaaatcaatgccgacggtgaggcgctgatcaccaagatcataggttcgggtgggcgggtcagccgcgccacctgcactgagcagttgatttatgaagtgcacgacccgtcggcgtacctcaccccggatgtgacggcagacttttcccaagtggggtttgtggaggagggcgttgatcgcgtgcgggctcagggcgccaacggcagtgcaaggccgcaacaattgaaagtcagcgtcggttatctggacggttggatcggcgaggggcaaatctcttacggcggccctggcgctgtcgcacgggcgcagctggcgcgggacgtcgtcctcaagcgccttgaattgatggacgtgaagatgcaggaggttcgcgccgaattgatcggcatggattccctgcacggcacacggggcagtgccgagccctgggaagtgcgcttgcgcgtggccgcccgctgtgaggcacgcagtgaggcgatacgagtgggtaacgaggtggaaaccctctacaccaacggcccgtcgggcggcggcggtgcgagtaaaagtgtgcggcaggtggtggcggtggcgtcgttgctgttgccgcgtggcgcggtcaacccgaggatcgaagcatgaaactgcacacgctggcccattcccgcaccggggataagggcgacacgtcgaacatttcaatcattgcctatcgcgccgaggattatccgctgttgtgtgagcagatcacggctgagcgtgtggccgagttttttgcaggtttgcgtgagccgggggcggcgccagtgcgacggtatgaattgcccaacgtgcaggccctgaacttcgtgctgccaggcatcctgcgcggtggcgtgacccgttcactggcgctggatgcccatggcaagtgcctgggttcggcgctattggattttgaaatacaaaactgaatgtgggagctggcttgcctgcgatagcggtgggtcagtttgcatttctgctactgatacaccgccatcgcaggcaagccagctcccacagggagttcacccgagtctgtcagaccgccgcaaaccgcttgtccaggtaatcaatgatcaccttggagtcatacatccaggtggtctggccattctcttcaatgcgcaggcacggcactttgatcttgccgccttgctcgagcagggtctggcggtcctgcgcgttgtgcttcgcgtccttgagcgccaccggtacattcaggcggtgcagggtgcggcgggtcttcacgcagaacgggcaggcgtggaactgatacagggtcaattccttggccgccgcattcacctgagcttgctgctcggcagaacgctgctttttgcgtgggcgggtcaggaagtcgcccgcgatgatgacgtggcccaggcccacgcgaagtgctttgacgaacatggctacaacctcttgcccgatacagaaggggtcgcagcttacctgaattttacgggcgaaaaaaaaccggcgatgaacgccggtcttttcttacatggcccgttacttgatcaggctgaggaactcgctgcgggtggccgcattttcgcggaactcaccgagcatcaccgaagtgatcatcgacgaattctgtttttccacaccgcgcatcatcatgcacatgtgcttggcctcaatgaccaccgccacgccgagggcgccagtcacttgctggaccgcgtcggcgatctggcggctgaggttttcctggatctgcaggcggcgcgcgtacatatcaacgatacgtgcgaccttggacaggcccagcactttgccgctcgggatatacgcgacgtgagccttgccgataaacggcagcaggtggtgttcgcacaacgagtacaactcgatgtccttgaccagcaccatttcgctgttgtcagagctgaacaaggcaccgttggtgacttcttcgagcgtctgttcataaccgcggcaaaggtactgcatcgccttggcggcacgctttggcgtgtcgagcaggccctcgcgggaaacgtcctcgccgagctggccgaggatcgccgtgtaattctgttccagggacatgaaactacctgtgggattttcgcaaagcgcaaggttacggtggcgagcacatcgctgcaagcctgacgatggcacgcgttactcgtcgcgaccttccatcatggtgcgcttgagcatcacgtacaccgcaccggcgccgccgtggcgggcctggcatgaggtaaaaccgagcacttgggcatgctggcgcagccaggtgttgacgtggctcttgatcatcgggcgtttgccgtccagccgcacggccttgccatgggtaacgcgcacgcagcggatttcgaacttggtggcttcggccagaaaggcccagagggtttcgcgggctttctccacgctcatgccgtgcaggtcgaggctgccttcaaacgggatctgcccgatcttgagcttgcgcatctggctttcctgcacgccgtcgcgggcccacatcagttcgtcttccgggccgacgtcgatgacgaactggtctgacaggccatccacggtggtggcatcggtgcgcacggtggcggcctggcgcagcttggcgatctgcgcccggtcagccttgggtttgccggtgtcggcgcggtcgtgcttgatcggcttgacaccgcgcagctcgtttttgaacagggaaaaatcgtcgtcttgcatgtcagcctccgcgaagggcgggcagtttacctaaatcgcggcggccggggcgcaggaaacgctatccaggtgccatcagtcgtgctttttcatcaggtgcgaagcgatgttcagcgacaacggctggcgcattctgcgacggctgcgccgccataaccagacgccgagccacaacaccagcaggccgaccactgccaggatcgccgagccgccagggctggcattcaactcgccaagggctggcgagtgaccaaacaggccggtaccaccagcgccggccaacagcagacctacaatcgccagcagcgcggcaaagccggctaccaggcgcagacgccagttgcttgggcccttggggcgcaagcgacgagcgtcaaaaccatcggatatcttcattccgacctttcctccagggtatcggcccttcgaccggaagatacacaggttgttccgggggcaggggtaaatgcgccaaatgaaagggctttgcggatgagcggggtaataaacactgccgcaccgctcatcagaaggttgatcagatcagatctttggtgagcgcgagggtagcgaagttgtcggccatgatggccatttcagtctgctgtacgtgttcggcactcagcacgccgcctttgtaaggcaggtcgcgagtggcgcaggcgtcttccaccagggtgcagcgaaagcccaggttcttggcggcgcgcacggtggtgctgacgctggagtggctcatgaaaccgcacacgatcaagtccagcgagccgaggtcctgcaagtgtttttccaggccggtgccgtggaaggcactgggcagcaacttgccgataatggtttcgtcacccagcggctcaagccccgggatgaactggccgcgctcaccctgagggtcaaacaggccaccgacggtgcccaggtggcgtacatgcacgatcggccgcccggcgttgcgggccgctgctaccagctgcttgatgtggtcaaccgccgcgtccatgccggaaagggcgagtggaccgctgaggtattccttctgggcgtcgatgatcaggagggtcgcgtggttcagattggctgctgcgtaaccgcgaccgctgagttgaaacatcgtctttggaacggacattctggggctcctgtgaggggggcttttgtcacattgtccactggctgagcggttctgtgaatcgctaccatcgtaaggtacgccgttgttgacgtgcagcgatgtcaagtgcagggcttgtttaacgcaatgatggcaaattggatgaattccgacgggtggcgcagaggtttcatacatcgaagggacgggcgaaggctgatagaatccccagtcgttttttccaggagcttgccccgtgatcacatcccgcctgcgcaccttgcgcgaccacatccgttgggctgtcagccgtttccatggggaagacctgtttttcgggcatggcaccgataacgcctgggacgaagcccggcaactggtgctgggtgcgttgcacctgccatgggaaatcaacgacagttacctggactgcaacctcgaagaagaggaaatttcccacgttcagcgcttgctgcaccgccgtatccacgagcgcgtgccgacggcctacctgttgaaggaggcgtggttctgcggcatgtcgtttatcgtcgatgagcgtgtgttgatcccgcgctcgccgattggcgaactgatcgaaaaccgcttcgccccctggctggccaaaccgccggcacgcatccttgacctgtgcactggctccggttgcatcggcatcgcctgcgcctatgagtttcaggacgctgaagtggtgttgggcgacctgtccttcgaagccctggaagtggccaaccagaacatcgaacgccacggcgttgatgagcgcgtctacaccgtgcagggcgatggctttgacggcctgccgggccagcgcttcgacctgatcgtgtccaacccgccgtacgtggacgccgaagacttcgccgacatgcccgatgaataccagcacgagcctgagctgggcctggcctgcggtgatgacggcttgaacctcgtgcgccgcatgctggccgaagccgccgaccacctgaccgagaagggcttgttgattgtcgaagtgggcaacagccaggtgcacgttgaagcgttgtacccggaagtggactttgcctggctggacttccagcgcggcggccacggcgtgttcatgttgacggccgagcagtgccgccagcatcaggccgtgttcgccgccagggtctaacggcaaacatgcggtcagtgtgggagcaggcaagccagctcccaccattcagattgcattccaatcgattaacggtgtgtcgcaatccagatcaacaaccccgcctgaaacaccgtaaacgccaccaaacacgtaatggtaaagcgcaacccgctgtcctcacgcttgaacttggtgaccttttcctcttccttgcgcagcttcacttcttgctcggccaggttgtgctcggcctgttgcaacatctgcgcagcttcgagaatttccacgaactgcaccttctcggtgttccagctgtcaagcacgtcgctgaccttgcccggttgcacgttgcctttgaggtgctgcacgtcggcgtaagccacgtcaaaaccctggatgcgcaggaagtgatcgcgacgcaggcgggtggcttcgttgagtgcgtccttgttggcgaggtccacgccgtcgacgcggtaatgcgaccagcgttttttcgcccaggcagcgccttgggctaccagaaaacgccccaggccacggttggccggctcgatttccaggctattgccggggccgaagtgcacgcggtgagtgtcgtggtcgacccagatatccaggtggttttgttcgcgacgcactcgctggcccggcaattggatgaccatgcgcagcaggctgcggtgtttgtcgttacgctcggcatagccaaattgcacaaaccgcagcggccgcacgccggtggcccggtcggtggccaggggcgcgaggcgcagcatcttgaaatgttcggcctgtacgtccgcccacggcagtgccgccgcctcgacggcctcggttttgtcagccggggtgtcggcggtaggttcgggtgttgcttcggtggttgtcatgcggcgcgatcctgtccaagccttgcgagccgacagcctttttgctgtcgactcccggcttatcggccgctttgccgaggactggaggccaatagtcgcttaacggggttgaagtccgtcgataaagcgcacgatgcgcgtgcccagctcggcggccagcggcagttttgggtcgttataggaggccagctgctccttcacatccttgggcacgatgcgcatgacgtggttcatgccttcgatcacggttagctgggcgtcgggctttgcccttttcagctgctgcgcatcggcgacgccgacctggatatcgttggtgccctggataatcagcgccgggatatccagcttggcgaatgcggccgacgggtcggcgcgaaacaggctgatcagataaggctgcacagtgggtcggaaaatgccttccaacgggcccggcacatccgcatcgaccttaccggccttgaggtgatcaagaatttcgttactgcgcagcaacagggcagggggcaggtggtcggccagttgctggcggatcacctggtccaccggccgggcgctgccggagagggaaatgaccccggcaggttccagctgcggcgcggcgagggcggcgaccagcgcgccttcgctatggcccagtacaaccagcgggcccatgcgtttgtcggccttaagcagcttgccccaggccacggcgtcggccacgtaggcgtcgagggtcaggttgcgctcgtcgggggtggcggccaggctggcggcgaccccgcgtttgtcataacgcacgctggcgatgttgttgcgggccagcacccaggccaggcgcttgaggctgtcgttgcgcgcaccgtcggcgctgttgccattgcggtcggtggggccggagccggcgatgatcaacaccacgggcaccggtttgtccgattgcggcagcaacagcgaaccaaacagctcgccgctgccggtgtcgaggctgatggggcgttgcagcaccacaggggaggcggcgaagcccaggctggaaaacagggtgagggtcaaaagcagaactcgcagcatcatcgcgccatcatcaggaaggtgccggttggacagatgtctaccggtaaggtttcgaggatgaactagtcggttagcctgcgtatactggccgccttaagttattacggttgacttgattcaactgatttcacggagcgccctgcatgtccggcaataccttcggcaagctgttcactgtcaccaccgcgggcgaaagccatggcccggcgttggtcgccattgtcgacggctgcccgcccggcctcgagctgtccctggaagacctgcagcgtgacctcgaccgccgcaagcccggcaccagccgccacactacccagcgccaggagcccgacgaagtcgaaatcctctccggcgtgttcgaaggccgcaccacgggttgcgccatcggcttgctgatccgcaacaccgaccagaagtccaaggactactcggcgatcaaggacctgttccgcccggcccacgccgactacacctaccaccacaaatacggcgagcgcgactaccgtggcggtggccgcagctcggcgcgcgaaacttcgatgcgcgtggccgccggcgccatcgccaagaaatacctggccacccagggcatcgtggtgcgtggctacatgagccagctgggcccgattgaaatcccgttcaagacctgggacagcgtggaaaacaacgcgtttttcagccctgacccggacaaggtgccggagctggaagcctatatggaccagctgcgccgtgatcaggactcggtcggcgccaaaatcactgtgatcgccgaaggtgtaaaaccgggcctgggcgagccgatcttcgaccgccttgacgccgagctggcccacgcgttgatgagcattaacgcggtaaaaggcgtggaaatcggcgccgggtttgcctgcgtgtcccagcgcggcaccgagcaccgcgatgaactgacgccggaaggttttctcagcaataacgccggcggcatcctcggcggtatttcttccggccagccgattgtggcgcacctggcgctcaaggccacgtcgagcatcaccacgccgggccgttcgatcgacgtgcacggcaacccggtggacgtgatcaccaagggccgccacgacccgtgcgtcggcatccgcgccacgccgattgccgaagccatgatggccatcgtgttgatggaccacctgctgcgcaaccgcgggcaaaacgccgatgtgcgtgtgagtacgccggtgctgggccagctgtgacggcccggctgtgacagccctcccatactggcgcctctccagcttctacctcttctacttcgccctgctcggggcgacggcgccattcctggcgttgtacttcgaccacctggggttttccagcgcgcgcattggcgagctggtggccatccccatgttgatgcgctgcgtggcaccgaacctgtggggctggctgggggattacactggccggcgcctggccatcgtgcgcttcggcgcggtgtgcacgctcgccagtttttcactgattttcatcagcaagacctacgcctggctggccctggtgatggcactgcatgcgttcttctggcacgcggtgctgccgcagtttgaagtgattaccctggctcacctgcaaaaacagacctcgcgctacagccagatccgtttgtggggttccatcggttttatcctcactgtggtgatcatgggccgtctgttcgactggctgagcctggatatttacccggtggtggtcgtggtgatcatggccggtattatcggcgcgagcctctgggtgccgaacgcgcagcctgccgcccatggcagccgtctggcggctgaaggtttcttcaagcaactgcgcagccccggcgtgctggcgttttatgcctgcgtggcgctgatgcaaatgagccacggcccgtattacaccttcctgaccctgcaccttgaacacctcggttatagccgtggcgtgattggcatgctctgggctgtgggggtggtggccgaagtgctgatgttcctggccatgagccgcatcctcacgcgcttttcggtgcgccgggtgctgatggccagctttttgttggcggcgctgcgttggctattgctgggttcgttcgccgggcacctctgggtgttgctgctggcgcaagtgatgcatgcggccaccttcggcagttttcacgcggcggcgattgcctttgtgcagcgcagctttggcgatcgtcaacaggggcagggccaggcactctacgccgccctggccggtaccggcggcgcgttgggcgcgctctatgccggttatagctggaacctgctgggcccaaccttcacctttagtattgccagcgtcgcggcgctggctgctgccgttatcattggccttcaattgcaagagccgaacaaaggaagcgtgcaatgagttatgtagccgtttaccacatcgctaccccggatacccccaacaaggtcctgacccacctcgacgacatcgcctcgaccctggcggagcacggcgtgaggttcgagcgttggcaaccggcccctgtcgagaagggcgccagcgatgccgacatcatcgccgcctaccagccgcagatcgacgcacttggctaccgttcggtgggcgtcgccagcatgacaggcgatcacccgcaaaaagatgaagtgcgtgccggcttcctggatgagcgacgttacagcgaagacgaagtgcgcttctttgtggcaggccaggggctgttcagcctgcacatcggtgactacgtatacgcggtacgctgtgagaaaaatgacttgctgatcattccggccgggttggcccattggttcgacatgggggagaaccctcactttgtgacgttgcgccccttcaataccgaacaaggcgctgttgcacagttgactggtgacgggctgtcacacggttttcccggtttggacgattaatagcggtatctgaattttcaaccccggtaagttggaagttgctgtgggaagaagcctttatcgctgtaaggctcagctgtttatgctgcgccttatgctttgattccattcaatatgtaactctctgcgccttgatgtttatgtcacctgtcaataggaggaatccgaagggtggcagggcatctgccaataacaggagagagatcaatgagtggccgagaggagtcgtgtggtacgccggtagccgtgcccatggccgttagaaagcgcctgagtttgtgcggaaaaccccttacgccgaccgagctggaaattttgcgctgggcagcggaaggcaaaacggtctgggaaatcggccagattcgcgccacatccgaggccacggtcaaatttcacctgcgcaatatttacggcaaattgcaggttaccaaccgtgtgcaagcggtgaatgaagcggcccgccaagggctgtgctgagagcaaaaaaagggccgcgacgctggatggcgtcgcggcccttttttgtatccgcaggcttaagccgaatggtaggtcggtagtgcaaagcgattctggctttgcagcatggaaatctgtggcagctcactggcttgttcggccaggtcgcggcggatggcactgatgacccaagtcaactgatcagcggtgtgcaattgctgataagagatcgagcgcttgacctgtttgccctcgctgttacgcagggtcagcaggatgccgccgtcagggcgtggctgagtggtgacgtcgtattgggagaatacagaagcgaatttgtcttggatcaggctcatgtctatcagctccgttggctcaagttggcaagcatggagtgataggtgcagcgattgtgccagtattggtttttgttaaaagtctttataaaacaatgagttgagaattataagattttttgttttcgtgcaaaatgcatgaatggccatcgtgcatcctgcattttgcgttattggcgatagcggttttcggcggcggctatcggtaatgaccttcccggtgcattggaattccgtttcggttgctgctctgcccgggatacaaaacttttcaaatcctgcgtgtacagccaaagaaccgcaggcgtattttcctgcaaggcatgcggcatcccgcttttgaaattgccggtgttttcggatcagacgaagaataagaaaaaggacgttcctccatgagccacccgcaagacgagatgatcacctggggcatgatgctgcgtaagctgccctctattgttcgggcgctgccccgcgtggcacgcggcatgcgcgccgcgaatgtcactgaccccaggcagccttgcggcctgggttggcatttcgagcaagctgcctctcgcaacccggacggcgcggcattgttgtatggcgacactgtactgagctacagcgaagccaaccggcgcgccaaccgtctcgctcattacctgcaggcccagggcattgccaaaggtgatgtcgtcgcgctgtttattgaaaaccggcccgaactgttattgagcgtgctggccgtggccaagctgggcggcatctgcgccatgctcaatacctcccaaacccgggcgacgctggtgcacagcctcaacctggtgaacccggtggcgattgtagtgggcgcggagttggcaagcgcgtttgacgccgtgcgcgttcaggtggctatcgcggctgaacggacctggtttgtcgcggaccaacaggcaaaccctgcgcctgctgggtataccgacctgatgctcgccagtgcggaatactccgagaacaatcccgacagtaccgcgcacatcttcttcaacgacccgtgcttctatatctacacctccggcaccactggccttcccaaggccggcatcatgaaacacgggcgctggaccaaaaccgcagtgagcttcggcagcatcgccctggacatgggcccggatgacgttctgtactgcactttgccgctgtatcacgccacgggcctgtgcgtgtgctggggctcggcgattgtcggcgcatcggggttcgcgattcggcgcaagttcagcgcgagccagttctgggatgacgtgcgcaggttcaaggccaccaccttgggttatgtcggtgagttgtgccgctacctgctcgaccagccagcgagtgcgcaggatctcgataacggcgtgaccaaaatggttggcaacggcctgcgccccggcgtgtgggcacagttcaagcaacgctacggggttgggcatatctgcgagctgtatgccgccagcgacggcaatatcggcttcaccaatgtattgaatttcgacaacaccatcggcttttgcctgcaacactgggcgctggtggactacgcccatgacaccggcgagccgttgcgtggccgtgatggcttcatgcgtaaggttcaaaagggcgggcaggggctcttgttggccaggatcgatgagaagtcgccgtttgacggctacaccgacccggaaaagaaccgcaaggtcgtgctcaccgatgtgttcgaaaagggcgaccgctattttaataccggcgatttattgcgcagtatcggcttcggccatgcgcaatttgtcgaccgtctgggtgacacctatcgttggaagggcgaaaacgtctccaccaccgaggtggaaaacgtgctgctgcaacatccgcagatcgccgaggtggttgcctatggggtcgagatcgaaaacaccaatggccgcgcaggcatggtcgccatcaccccgagtgaatccctggcggccctcgatatgcgcgagctgctgcaattcgcccacggccagttgccgcactatgcggtgccgctgttcctgcggatcaaagtgaagatggaaaccacgggcacgttcaaataccagaaggtgcggctcaaggaggaggcattcgacccggacaaggccggtaatgacccggtctttgcgtggctgccgggctcggattgctacgtaccggtgacggggcagttgctggcgcagattcagggcgggcactttcgttattaacaaaagcagcgttattgattctgcctatggcggcttttgacaaaaaagccatgacaggtggggaactcactggcgacactggcgaccttagaaagcattagccaaggagccccacatgtctgatcagcccaaacaaatgaccgaagacgaagccgccgagtttgccgagcaggtcttcgacgtggctcgccggggcgatgcggcgatgctcgccgcgctgctggccaaaggcttgccggccaacctgcgcaaccacaatggtgacaccttgctgatgctcgcggcctaccacggccacgccgacgcggtaaaagtgctgctcgagttcaaagccgacccgcaaatcccgaatgacaagaaccaactgccgattgccggtgcagccttcaagggcaacttgcccgtggtcaaagcattgattgaagggggcacacccgtggatgcgtcatcctcggatggccgtactgcgttgatgctggcggcgatgttcaaccgcgtcgaaatgcttgattacctgcttggccagggtgccaactccaaagccactgatgcccagggcgcgaccgcgctggcggcggcgcagaccatgggcgcggcggatacggcggcgcagctgcagaaactggtgtaggctacgcgccctcaaaagccagaccgtcacaggatcatcccatgcaaaccgccctcgtcgaactcatcagcaaaatcagcgccggcgtcatgggtgaagacgaggtcgcgcgcattgccggcgaggcggccgaggcctacgccgacccggcggcctttctgacggcgaatccggatatcaactacgacgacaccttccctatcccgttgggtgagtgggtggtagtcggcagcctgcccgacacggtgctgttccaggccgacacctacggcgatctgtttgcgcagatcgtcgcctcattcggtccgggcgtggcattcaacctcaaacccaagcaactggccaagacggaagccctcacggcgctgaaccgcattcagatccagatgagcgccctcagcccggaagacggcggctacgtgttgctgaacttcagccaattgctcgatgacgaaatccaggccgtgctggtgtacggcaacgacctgccgcgcgtgctggagttgtgcgccgaagtcggcatcaaggccgagccgtccctggaagcgttgcgcgttgcggtgcacgtttgaaataaaacggaaccgccgccacggctgactatcctaatgaggcatgccctcactttaggagcgacaccatgggttcgacgtttaatggcctgattggcctgatcatccttgcgctggatatctgggcgatcattaacgtgttcaaaagcggcgcaagcacgggcgccaaagtgctgtggattttgttgatcctgctgctgccggtactgggcctgattatctgggcgattgccgggccacgggggaatgtgcggatctaagcgcttcacccaatgtgaagtggacacagtaaatgtgggagcgggcttgcccgcgatagcgatttatcagtcacttttgtgcaggctgacataccgctatcgcgagcaagcccgctcccacattggttccagtacatcaattggatttgtgtatcgaaagtattcactgcacacaattttcacatcttatccaagacaattcgcccgcttttacagcgctgccaaggctctaacgccagtgccattaaaggcagggcaactgcgctcgttcagtaattaatagcgttgatgccattgatcgggcaccatttgcgccaccgcgttaaccgcctaccccagcaggcctgggcgagggacggacgccactgcattatttcgcaacttaaacttccaatgggtcctgaaacgacatggcaaacccggacgccctgagtcagcagcgagcttctaatcgcctgctgcaaccgaccgtcaaatcccatctggcgtacacgctgctctgcgcactggtcatgatggtgatgttctccctgctgcgcctggcgctgctggtctacaaccgcgagatgatcctcgacacgccggcctcgaccttccttgaagcgttcgccaacggcctgcgcctggatatacgcctggtgatgtacgtgctggtcccgctgctgctggctttgttcagcgttcgggccatggcggcacgcgggttcttccgtttgtggctgaccgtcgcgtccagtattgccctgttcctgggcctgatggaaatggacttctaccgtgaattccaccagcgcctcaacggcctggtcttccaatatgtaaaggaagacccgaaaaccgtgatgagcatgctctggtacggtttcccggtggtgcgctacctgctggcctgggccgtgggcacgctgatcctgagcatcgccttcaagggcgccgaccgcgcaacccgcccacgcggcccgttcagcggtggcagcatcggcacacgccaggtggcgccgtggtacacgcgcatcgccgtgttcgtggtctgcttgttggtggccgttgtcgccatccgcggcaccctgcgccagggcccgccgctgcgttggggtgacgtctacaccaccgactccaacttcgccaaccagcttggcctcaatggcaccttgtcgttgatcgccgctgccaagtcgcgcttctccgaagagcgttccaatatctggaaagccaccctggaccagccactggccacccagaccgtgcgtgacatgttggtgttgccacaagaaaaactggtggataccgacacggccgccgtgcgtcgtgactacacgccaccggccgagaaaaccctgccgatcaagaacgtcgtcgtcatcctgatggaaagcttcgccggtcattcggtgggcgccctgggccgcccgggcaacatcacgccgtacttcgacaagctgtccaaagaaggtttgttgttcgaccgcttcttctccaacggtacgcacacccaccagggcatgttcgccaccatggcctgcttcccgaacctgccgggctttgaatacctgatgcagaccccggaaggcagccacaaactgtcgggcctgccgcagttgctcagtgcgcgcaagtttgacgacgtgtatgtctacaacggtgatttcgcctgggacaaccagtcgggcttcttcagcaaccagggcatgaccaacttcatcgggcgcaacgacttcgtcaacccggtgttctccgacccgacgtggggcgtgtccgaccaggacatgttcaaccgtggcctggaagaactgaaggcccgtgaaggcggcaagccgttctacgcattgctgcagaccctgtccaaccacacgccttacgccttgccgacgccattgccggtcgagaaagtcaccgaccgtggcagcctcaacgagcatttgaccgccatgcgctactccgactgggcgttgggccagttctttgaaaaggcccgcaaagagccgtacttcaaggaaaccctgtttgtgatcgtgggtgaccacggttttggcaacgagcaacagatcaccgaaatggacctgggccgtttcaacgtgccgatgctgatgatcgcgccgggtatgcaggaaaagttcggcgagcgtgaccacaccgtgggcacccagatcgacatcgtgccgaccatcatggggcgtctgggcggtgacacgctgcaccagtgctggggccgcgacctgctgaacctgccggaaggcgacaagggcttcggcgtgatcaagccatcgggcagcgatcagaccgtcgcgttggtcaccgccgaccgcattctggtactgcccaaggaaatgccgccgaaactgtgggaatacgaactgggcgccgagccgaccggtaaagtgatccctgagtcgccggatgaagctgcattgaagcagaaacttgagtcgttcctgcaaaccgcgaccaagagcctgttggataacaccgccggtgtgattgacggcaagccggactaattaaccggcgataaaaaaagaggcctcgatgaggcctctttttttgcctggcgtttatatacggccgagcaacaacaggaccagcagaacgaccaggacaacgcccagaatgcctgacgggccataaccccagttgcgtgagtgcgggaatactggcaaaccgccaaccagcagcaggatcaagataatgattagaatgaggctcatggttttttccttataggccttctataagaccggttattaaacaagaggccgtcatttaaatacggacgccttaacaactccgactgcgccgcttcaggaaaaattccatgattccttaaagcattttgcaaacaggcttatttcttttaatgcgttcgcaaataccgtgcattagttgaaaaagattgaacttacgctataagcccgcctcgcacccgggcccgggtttgcccgaggcattcatcaattggatggtgcgtgggtgtgggaaaaaccttcgctacactgccgatcacttcttctgtgaaccacaaggcaatgttcctatgcaaaatcgcatgatgatcacgggtgccggatcgggcctcggtcgtgaaatcgccctgcgctgggcccgcgagggttggcagttggccttgtcggacgtgagtgagccgggtttgcaggaaaccctcaagctggtacgtgaggcggggggcgacgggtttgtccagcgttgcgatgtgcgcgactacagccagctcacggcatttgcccaagcctgtgaagtgaagctgggcggcattgatgtgatcgtcaacaacgccggtgtggcctcgggcgggttctttgccgagttgtcgctggaggattgggactggcagatcgcgatcaacctgatgggcgtggtcaaggggtgcaaagcgttcctgccgctgctggagaagagcaaggggcggattatcaacatcgcttcaatggcggccctgatgcaggggccggcgatgagcaattacaacgtagccaaggcgggtgtggtggcattgtcggagagcttgctggtggagctcaagcaacaggaagtgggggtgcacgtagtgtgcccgtcgtttttccagaccaacctgctggattcgttccgtgggccgaccccggcgatgaaggcgcaggtgggcaagctgctcgagagttcgccgatttcggcggctgacatcgctgactacatctatcagcgggtggctgagggtgagttcatgattttgccccatgagcaggggcggatggcgtgggcgttgaagcagaagaacccgcagttgctgtatgacgagatgacgctgatggcggacaagatgcgggccaaggcgcaggcgggggcgcttaagggctgagttgttttggagtgtatagcctgtgggagctggcttgcctgcgattgaatcacctctgtgtgcctgacacaccgaggtgcctgcatcgcaggcaagccagctcccacatcactcaggtcggctgtgaggccgcccaaatcacctcaggtctgtcagcaaaattacctgaaaacgtaggccccgcctgttttaaccgcaagccattgcccggccccaatcaagcgcgcatgttcaggttcctgtcactccaaaaggacaaccgccatgctggtcttaagccgcgccgtaggcgaaatcatctccatcggcgatgacatcgccctgcacattctcgaactgaacggtacccaagtgaaattcggtatccaggcgccggtaggcgtcaacgtgcaccgggccgaggtctatcaaaaaatcctcgaacgtcaggccgcagaaccccaaaccaacccttgaacatcctcagtcaaacagatgcttgggcacgtcgtgcttgagcatcaactggcattgttcactttcagggtcgaacacgatcagcgcctggcctttggtcagcgcctggcgtacgcgcagtacgcgggtttccagtggggtgtcatcaccgttgtcggtgccgtcgcgggtcacgaaatcttcgatgaggcgggtcagggtgtcgacttcaagtgcgtcgtagggaatcagcatacaggcctcgggtgatggatcccggcgatgctactgcgccgggatcatagttgccagcctctaggacttgttgcccaccaggctgtccaccgacggcacacgggtatcgctctccatttgcgtctcgtgctccagctgatggctgaaccggtccaaagaaccctgggccggttgggcatcgctggcgaagaccggcgggctgaggatgtacgcacccagcaggcgactcagcgccgcgaggctgtcgatgtgggtgcgctcgtagccgtgggtcgcatcgcaaccgaatgccagcaaggccgtgcggatatcatggccagccgtgaccgccgaatgcgcatcgctgaagtagtaacggaacaggtcgcgacgcaccggcaggtcgttgtctgaggccaggcgcagcaaatgccgggacaagtgatagtcatatggcccgcccgagtcctgcatcgccacactcaccgcgtgttcgctggaatgctggccgggggcgaccggggcgatgtcgatgccgacgaattcgctgacgtcccagggcagggccgctgcggcgccgctgccggtttcttcggtgatggtaaacaacgggtggcagtcgatcagcaacggctcgccgctgtcgacgatcgccttgagcgctgccaacagtgcggcgacgccggctttgtcgtccaggtggcgcgcgctgatatgcccgctttcggtgaactcgggcagcgggtcgaaggccacatagtcgcccacgctgatgcccagtgaatcgcaatcagcacgtgtggcgcagtaggcgtccaggcgcaactccacgtggtcccagctcaccggcatttcatccacggcggtgttgaaggcgtgcccggaagccatcagcggcaacacgctgccgcggatcacaccgttgtcggtgaacaggctgacgcggctgccctcggcaaagcggctggaccagcaacccacgggtgccagggtcaggcggccattgtccttgatcgcccgcacggcggcgccgatggtgtccagatgtgcggacaccgcacggtcggggctgtttttctggcccttgagggtggcacggatggtgccgcgccgggtcatttcgaaggggatgcccagctcttcaaggcgttcggcgacatagcgcacgatggtgtcggtaaaacccgtggggctgggaatggcgagcatttccagcagcactttttgcaggtagttcagatccggttcggggatggttcggctcataaagactcctgatagcgtgtcggggtgggggcctttaatggcctcatcgcaggcaaaccagctcccacaggttgagcgcattccaatgtgggagcgggcttgcccgcgatgaggccggaacaggccacccatcgatcaagccttgggttaactgtggggaaacaacaaatccacaaatttttccgcagtcggctgtggctcatgattggccaggccagcgcgttcattggcttcgataaacacatactcgggctgatcggcagccggcaccatcaggtccagaccgaccatggggatgtccagcgcacgcgcagcacgcacggcggcgtccaccagcgtggggtgcaggatcgcggtgacgtcctccaggcagccaccggtgtgcaggttggcggtgcggcgcacggccagggtctggccacggggcaggatgctgctgtagtcgaaaccggcagcgtgcagggtgcgttgggtttcggcgtccagcgggattttgctttcgccgtcggtggcggcctggcggcgacggctttgggcttcaatcaaggcaccgatggaatgctggccgtcgccggtcacttcggcggggcggcgaatcgcggcggcgaccacttcaaaaccgatcaccaggatgcgtaggtccaggccttcatggaagctttccagcaacactcggctgtcgaactggcgcgctgcttcgatggctttctgcacctcctcgatggtctgcaaatcgaccgccacgccctggccttgctcgccatcgagcggtttgaccacgatgcgctggtgttcgtcgagaaactccaggttgtcatcggcgctgcccgccagttgctgttgcggcagctgcaaaccggcagccttgagcaccttgtgggtcaggcttttgtcctggcacaaggtcatgctgatggcgctggtcaggtcactcaaggattcacggcagcgcacgcggcgcccgccatggctgagggtgaacaggcccgcatcggcatcgtccacctgtacatcgatgccgcgtcggtgggcttcttcaacaatgatccgcgcatagggattgaaccccgcctgcgggcccgggccgagaaacagcggctggttgatgccgtttttacgcttgatcgcaaaggtggtcagcgcacggaaaccgagcttggcgtaaaggctcttggcctggcggttatcgtgcagcaccgacaggtcgaggtagctcaagccacggctcatgaagtgctccaccaagtggcgcaccaacacttcgcccacgcctgggcgcgtgcattgcgggtccaccgccaggcaccacaggctgcaaccgttttccgggtcgtgaaaggctttttggtgattgaggcccatcacgctgccgatcactgcgccgctgtcttcatcttcggcgagccagtacacagggccgccttgatgacggggcgtgagccgttgcgggtcgacgggcaacatgccgcgcccctggtacagctggttgaccgcctgccaatcggcgtcggtctgtacccgccggatacggaagccacgaaacacccgggtcgccgggcgatagtcagtgaaccacaggcgcagcgtatcggacgggtcgaggaacagctgttgcgggtcgatccccagaatctgctggggcgcagccacgtacaacgcaatgtcccgttcgccggcctgctcgttgagcaactcctcggccaaactggcagggtcgggaaaggtatgcccaatcaacaaccggccccagccgcaatgcacggcgatgggttcggcacccagagggctgccatcttcagccaggcgggcttgcaggcgctcgtaggtcggcgcctggcccttcaacaggcgttggctgtaagccgcagcaagaggtttcatcgatcagattccttgttcgctgagccacaggttcagcgccgccagttgccacagcttggagccgcgcagcggcgtcagctggccttgcgggtcagtgagcaggcggtcgagcatggcagggttgaacaagccacggtcctggctcgggtccagcagcagttcacgtacccaattgagggtgtcgccctgcaaatgcttgaggcccggcacggggaagtagccttttttgcggtcgatgacttcactcgggatcacgcggcgtgccgcttctttgagcacctgtttgccgccatcgggcagtttgaatttacccggcacacgggccgacagttccaccaggcgatagtccaggaacggcgtacgcgcttccaggccccaggccatggtcatgttgtcgacacgtttgaccgggtcgtccaccagcatcaccgtgctgtccaggcgcagagccttgtccacggcggcatcggcgcccggcattgcaaaatgctcgcgcacaaaatcgccggcggcgtcattggccgtcagccatttcggtgcgacggtagcggcgtagtcgtcgtagctgcggtcgaaaaacgcatcgcggtaagcggcgtaagggtcgctggcgccgtcgacctgcgggtaccagtggtaaccggcaaacagctcatccgcgccctggccgctctgcaccaccttgcaatgcttggccacttcccgcgacagcaggtaaaaggcaatgcagtcatggctgaccatcggctcgctcatggcgcggaaggctgcgggcagttgctcgatgatctcgctttcggcaatgcgcaactggtggtgacgcgttccgtagtgcttggcgatcaggtcggaatactggaattcgtcgccgcgctcgcccccggcgtcttcaaacccgatggaaaaggtcgacaaatcctgcacgccgacttcgcgcagcaagccgacgagcatgctcgaatccaccccaccggagagcaacacgcctacatccacggcggcgcgttggcggatggcgacggcttcgcgggtgctgtcgagcacacggtcggtccagtcttcgagggtcaggttcttttcatcgtcatgtgggccgtagggcagggtccaccagactttttgttcagtcttgccgctggcgtcgatgcgcatccagctcgccggtggcagcttttcaattcccgccagcaaagtacgtggcgcgggcaccacagcgtggaagttcaggtaatggttcagcgcgaccgggtcgaggatcgggttgatatcgccgcccttgagcagcgccggcaacgcggaggcaaagcgcaaacgctggccggtacgcgacaggtacaacggcttcacgccgaggcggtcacgggcgataaacaggcgctgggcgtcacgttcccagatggcaaacgcgaacatcccgttgagcttgggcagcaaggcttcgccccaggcgtgatagcccttgagcagcacttcggtgtcgccgccggaatagaaggcgtagcccagggcttccagctcttggcgcagctccgggaagttatagatcgcaccgttgaaggccaggctcaggcccaagtgtgaatcgaccatcggttgggccgagccgtccgacaggtccatgattttcaggcgccggtggcccagggcaatcggcccttgggcatggaagccccaggcgtcggggccacgcggggccaagtggtgggtgatgcgctcaatggctgccaggtcggcaggttgggcatcgaaacgtaattctccagctaatccgcacatattccataaggccttgtgtttgctgggtcttggcgcatctaccgggtttcgagtaccaaatttgtaccgtttttcggtaaatccagcttctcaagctccgcgaaatcactcgaagaactgatccacttggcataggttgaaagcagaacctggacgctgtgtccaagttgcgcggcgatgaatgcggggttcattccggacatgaggcacattgttgcgtaggtgtgcctggtatcgtacatccggcggtaccgtattccacttttgcgcaaggctgacaaccaataacgcttagccccagtttcggatcggatgtatagctctgatctgtcacccgaaccgtccggcgcgaaaacataatcagagcgcgccgccgtaagtggtctggctttttcgagtgcctgcaaagctcgatcgttcaataaaacttcccgcgagacctttgtcttggtcctctccttgatcttgccgtacaacctgatacggcaaaccttggcgcgcctcgagcgcgtatcaacctcgctccaccgcagggccatagcctcgcctggacgcattcctgtatagaaagaaaactcaaaaaaacatgcgtaaattgcctgcaagccgctcgtcacctcgtacagcatggcgatcaaatcgtctgcctcttcgcggctgaatgggtcgatctcgcgcttggtaacccgagtcgccgggattgaatttgccgggttcctcattatcagctcatcgctcaccgcctgggtcagcatgcctgtgaccaaccggatcgcgcccttcctgcgtgccggcgatgtccaagtaatcccgttgacgattttccgcatcaggaccggcgtgatcttgtcgagaggatattcagccaggtgcggaacccagtaggtttgcatggtgctgcggtagttcttgcgggtgctgtcttcgatctgaaggctgttcagccagtcctgggcgtagtcgaagaatatcggcatgtgaccagtggagtcgctccggctgtttggaaataactccctgtacttctcctgcgtgagtgcccccagctttgccagctgaatcacttgagaacgtagagcctcggctgctgcgattccccttgcggtttgcggtagagcgagcgtttcgcagtgccgtttcttgttccaggagaacctgatcctgatcgatttaccgacaagctcaactccggtgggcagctccattggctctctagccattcgtcgtacctccatttgctgtacatgattcgtccgtcgatcttcgaccagacgccggcggggatgatgttacgttcacgcttgcgttgcagggctttcggcgtggtgcccagcagttcggccatccgcttctcggtgaccttgtcgtggccggactcatcgcccagcttttcggctgttgccatggtggtgctccatgccgcgcgcggcggcagagtgttcagtggatggtcacgctgtcctgccctggggctactgcgcgtgcttgctgttcggtgcggaaggacatgtgctgcttgatgccgctgcagtccgcgataacccaccaataaccgccaaagcggtgtgggcctttgatgattttggtgatggtcatggggtgtccttgccgcgctgggcggcagaaggtgggttaatccatttggtaccagacgccgcagtcgatgccctcggcagtcagcgacttgtacatcgcctgtacgccggcgtagcgccggttaccctggccatcgaagggcgcgctgaggtgaaaggcccgggcgtggtaggtgctcgccgactgcatccagccttgaaggccggcatcgtgcagggtcttttcgcgaaggaggccgacgcggagatagacccggtcgagattggcgctaccgccgtcatccggtgcagcttttgccgatgccttgccggattcaatggcgcgcgagactgcggcgaccaagtcaggcaactgatcttttttcatgcgtgcatacctcgcccgccgctcaccggcaggcatgtaggggaatggagtaatggctttttgccgatatttaaagtgcgcgggattttgtgtacaaaagggttcaactaagttcgtggtgaggcatggacgtgtcacacaacttcgatacaccaatagcgcacgcttatcgcggccacgtaatgttcctaaagttcgactggcgccgcccgaacgacgattctcctgttgctgccaagatcatcgagccggcacccatcgatggcttaggcgaggttgctgctgagttgaaggggccgtggcctgactacccaacagctcttgatgacgccatggcggcagctgagcgatggatcgacagtcagttgccctgatgccgctcaccggcaggcatgtagggggattggggttaggggctcttgcgttctggcggggatggcgggaatccaaagtagtgcaggcgctttccggtgtagccgcattcgctgcaacccgtggacgggccacaactgcagccaccctcgcatccacaactgcacccggaacagttcaaggtgcagcagccgtgctgttccacctcgccgtccctgttgattgagtagtgggagcgacggtcaagccggaaaccggtgatcttttcggcgtcctcgaaggtggcaggctccactcggaaaccgtactgggctgttgggtcatcaacgatccggcggacattcctcatggcctgggccccttgtagatgaacacgtaggcgaaccagggggtggggatcatggcgtcaccagttcgtcaggcacttcgaagaagccaagtcggcccttgagcggtgtaaacggcaggggcttcgggtcgcgcaaccagaaccctttatcgcccatgtaccagggcgaattgcagtcgctgaggctgtccaacaactcgacggagccgattaccccgccgcgctgaagatcctcaaaggcaggcagcttgacgtctatgccggcgtcttcaaggaagcccaccgtttcaccgtggccggcgacgtagttgtattccagtcgggtcataccttgcgcagcgtgtaccaggaagcgcccgcggaacttggtgtgccagctgcggttttcgatgtccttgccgccgtggatgatcagccaggcccagggctggcgaatggaaagggctttcatcggcaacacttttccttgccgctatagcggctgactttgaagggaggggttactgctgttttgcgaagaggtttgtttcttccagggctttgcgcagctcggcacgccaccaaactttacttccgtggggcccgggctcgccaaaccaataaccatccagattttcagcaccttcaaggaacttgagaacctgcacgagtcgttccggcaccaccgctaccttcgcgggctgctcggcgaccaggctcagcttcggcccatcaagcatgggcaaccagcctacaggcactcccttgccctcggtgaagtggtcatgagaccagcaccacccagcgaagcgccattcatcttcgccgtcgttgtcgaggttgttggcgccaatggttattgcctgttcggcgtcctcggtagaatgctcgtcgaactcgaccagtagacgcaacatggtcccgtcagtaggcgcggtttccatggctcgccagcgtgggtcgtggtcctcttgagccccgcaagcggtgcaaacaagcaggtgaccgccatcgtccgtccattcatgcgcgcaaggtgccggctcatccagcagggcgcgcagctcaacgacatggctatcggtctcgaatcgaatcagggccgcgtcccgaagcgccttctccagaaccagcggcttaacgctgatcattctttcatttttcatacagcctccctcgttaccagatcatgggcattcacaaccgtcatgccgaggcgttcggcgatcaggacttccaggcgggcaccctttgaatgctcccagccgggcagggtggccacggtgtcgcagtccatcagtgcggcaatgtcgcggcgcatgcagtcgttccaggtgccgccgtcagggttgatctcggcggggttggtgacggtgtggccgccggcgcgcaggttcgtggtcatggcgtggaaggcggcgaagttgaggtcgggcagtccggtcatggggccgctcaggtaaatccgtttcacggggagtccttgccgggccatgcccgggcggtggagtggtgtcaatggggtgggcgcgagagaaagttgcgacttgtaggaaggctttccacaagtttcccgtatcgagcgataccgtgtgcgcaccctatattcgtcctcaagccaaaccacttgaggtgcaaaacatgctcagcaaactaatcaagctcctaactttcataactgcattgttaaagtttgttgaggttattcggcgtacgggctggttttgagttgctgaagaaagcgccggccgatccagcgaaccacggtgaccgccttgctgttgccgatcgccttgtagcggggaccgtccgggcactcgctggcaggcttgccgcgccatgggatcagggtgtagtcgtcggccatgccctgaaggcgttcgcactcgaccggaaccaggcgccgaaccattgatgggctggccaggtagttctgctgttgggcgccggcctcagcggcaagcgcaccgacaatctgcccgtcgcctcctatgtggcgaacttcgcttcggctgttctgtgtgaacgccagcagcgcattctcctgcccattattccggcccagcgcgtgcgcctgatcgatgctgacgcagggatcttgcgtaccgtgcaccaccagatggctgtggccgtggttcgcatcctggccagagcagccctgcagtcgcccatagctcgcatcgaaggttgcggccacgcacggcacatcgtcgtagctgtagccgccgtttttccggccgcccccggcgagtgtcggcgcgacaaaaaaggtctcgctttcgatgtcgagccgactgtccttggcagtgagcgttgctgcgcgctcgatcgagccgccaaggccgtggccgccgaacgccggaatgccgccgaacatatcgaccgccggaccttcatcgccttcgcagttcgggcacccgtactggcctagggattcagcgaagacgcatccacatccgcactggagcgcagggccgaaaggagctgttccggtaacgtcttgcccctcgcctcggcgcggcgcagtatcccggcgcacgccttctcgctcaaaaagtacctcgctgggatcgaatccgttacgagcacttgcgataacgaacacacgacggcgtcgttgggccaggccgaaatattgggcgtccaggacccgccacgcgattgttcttttgggtccatacacacaaccagcgtcctgccattttttccctggaggctgcagctcgcagtcttccccagcaagcgcgccaagaaagcatccgaaggcgttccctttgtcgctgaggacgccggggacgttctcccagacgataacgctggcgggctttcgctggccggcgcgaacatagtcaactgcatctgcaagctccacgtatttgatggtgagggcgccgcgcgggtcagtgaggccttcgcgcataccggcaaccgagaaggcctggcacggggtgccgccgaccagcacgtccggcgccgggatcttgccggccagcaccagggcggccagcttggtcatgtcgccgtggttcggcacgtcggggtagtggtgggccaggaccgccgaggggaacggctcaatctcggcgaaccaggcggcgcgcatgcccagcgggtgccaggcctgggtcgcggcttcgatgccgctgcacacagagccgtaggtgatatcgggcatatgagatcctcgccgacagcgtatggcttcggcataatcgactgaattgttgagttgggagagcgagttgaagaaggattggattatttggttaggatgcttactgttattttcttccgggatggtttgggggatgattccgatcggaaccgatttcttcaaaataaaagatgtacatgacctcttcgaaatcttttcgtctatagcaacagttctagccgttgggcttgcgttctttggagtgaacgcgtggcgccagcaagttagcgctgaagccgaccatgcattggcccagcgtgttgcggttgcggctttaaaatataaagagacaacccgagttgcgttcggagacgcccagtttgctgttatgcagttcagcgtcggtattgatgggctgccagcgggcttgctagaaacatttatttctaagatggaggagcgacttgaagcgagtcagagttctaaagcagagtttttagcggtgttattggagtgccgtgctatatgggggagcgagtttccgaaccgctatgatgattttctgaattttacagaaagtttgtttggctgtttaaggactttttttaagtgggtacggttagacaaggagagcaggtatgctgatgtgtttgcgcaatctatgcatagatactacgagcagtttgagcaagagcaatggctccaaattactgcaccccagctaacgaaaatcgacgaattgacgaagcaagctgatatggagctaaaagagaaactgctcagaagcaactgatatttggctagccctgtaacctaacggtgactccgatgagcacgaaaaccgatgtggaagcgatacgcctgatcggcgatgaggttgtccgtctgctcagccttcctgaagaaaggcttgaggccgaggtgcgcctggggctcaagctgatcgctgacctggcccggtggcgcgacctcgccggcctatcgactgcagagcctgctggcacagttcgttgatatggggtattacggatgaccggcatggagccggatcaaggagaaagagttggtcagcctagagctaaaaaaagcagacttcgcatatcgaggtatgaacgttaaagttacctatttcctgaactcttcgggcgccgttcttcggtttgacgtgtacgccgcactgtctcagaaagaggaaaaaattggagcatcgatccagggttgggagacagagagcgatgccatgaccgctgcgaaaactctggcggcagaggccatcgacaagcacttgctggaaaaatagctggggttggcagtgccggagggtcaggaccggcgaaccttgaaaccgaacatgcactcgatgtcgtggtactcgcagctctcgtaggccttgtacttggcctgtgaaggcgtgctggcgaacacaacaacaattgttcggttggtgatgtcccaccagtcccagccagcgaccagaacctggtagcgcttcagtggcagcttctctgccatctcgccgtactgcatctcccaggttgggtggtagttgcgaatgcgcttcttcgggtcgctgtcgaggatgactccgatgtagtggccacggtcggccatgatcacgccaggctcaccgttggctatgacacggcggccgacttcggcgggcacctgatagtgctgccggacgtacgcgcagttgtgggtcatggattatctccagtcaggcgccgccttccgtgaccggtggtggcaatttgataagatttggtgtctgctgctcgatccgagcgagttgagcgaacgaagatgattaccctgctaactataaaagcgcttttcagctgcgcctcagtccttgctggatttgtttcttgtgcttattggtatcgctcgtcgaaagcggaagtcctctggggggatataacagaatttgatgatgacatcggtattgaggctggcggcaagtctatagctatgttcgccacatcgaaaaagcagagcatgttgggtgctagaggagcgcttgcagcagcaattgccgcaatgtgtcagttgattcccttggcgcatgacgcctatttgacgacgaccgcagcgtcctaactctgctttcagattgtccaattcggaaaaaagaactagctgccattcttcattgagggactgtgcagatgacgctaaccgggtctttctatttcgtcttcaggctcaggcgggtcttcggcaagcgacttcaggcctgccgcccggataagctgagacaccttttcggtaactacaaaaggtgtcgtgacacacttgagcatctgcgccgcggtgtcgaagtcggcggcgatcacgttgcgcagcaggttctgatgcacttcctgctggttgttgaaaccgtgctctttcatcagtctcttgagatcggccttgaagatgccggcgacctcaactgtaaacttctcgacgcccaatgctgcgtccttcgccgccgctttctcgcgcttgcggcgctgcttcaaggcttccgccgtcggctgctgttcttcctcggccatggcctacctcttcaattccacttgctggcagtgccaggcatgtcggtcggcgccgcgcggcggttatcttgctgattcgcctcatggggtttcagcgaacttgaagccgttctctctggcaatgagccgggcgcgcttgtggtcgatgccgagcgcagcggctgccttgttgatcgacatgccgctctcggcccgttgcttgagccctggtgcaagcctgtcgcgttcggcgcgcaacttgctgctgtgcccgccgccataggtgccgtccttcacgccgcttacgccttgggcgacttcctgcacgcggcgcccggcgccgaagaaggcgtccagctgctggttcaggttttcgatgatcgagtcgcgcgggttgggtattggctcaccgatcattgggcaccgcctgagagcgtgaccttcacaccatcggcacgagattccagcgcctgggccaggttgctggcttccttccagttccagcggaagcccttcaccttgccggtggagcgctcaacgatgtggtacgcgttgccaacgttcttgatctgaaagcggatctgctgcacgggctgctccttgccgatcagggcgtagaactcggcggtggcaatgcgggagcgcaagtgcagggccgcaaccccgtcaacgcgctgttgaattgatgcgtgcatggcgaatacctcagtgggttgcgtttattcgtcagcaacctgaccgcctgctgtttgccgttgggcgcaggggagggtgctgacgggtaaaggcaaggcgtaaaaaagcccagtcgggaccgggcttttcgttctgtcacaaacgcctccgtacgtgacaagcccgcagagcccatctgggccgtgcaggtatctgtgcttttacatggctgccaatcctccgttgttcgctcactgggttggcagtggccaccgttctttgagggtgttacatgcaggtgggcggttataggccgcgatttcgtccgcattggggtgtgatctgtgactactgctggcttctgtttgcggtcgccggcaccacaccggccatttgtgcacttggccacagcgttttcatgcagatcacactccgatgcagcctggtgctggggagtaccagggcctcgggcagttttcgtcaggctgacgtggcgctggttgttaggctgcgcaccgccgaacacgggtcttggcgtcgagcgccttgagtttctgcacggctgttgtgtattgcggatgattcgaacccaggcggctcacctcgcccagaatgctcactcgggcggctcggacatgcttgagtgcctgagtgatgtggtaggagcgaacgccagcacggtgtgcgagttcgcgagcgctgcggcagtgctcttttgcaagaatggtgtgggtatcgattgaccattggttgatcgagcttgctgtcttgccagcatggtcttggactttcattttcgtgccctcggttgtcatcccactgcaccctgtcgccaaggtgcagaaggaagatccccgctctatctgcgcgcctcgtacccgctgctgattgcaggccgtaggtcgtcgttggttgggcgttgcgcttcctccccgtcacctcaatcagcatctgtaggtggtggatcaaaggtccgtacaacatgcacgctgcagcgcggtgtgcccgactggagtggggcagggtgcatgaggtccagcgttcccagccgaggctatcgggaccgctaattcgattcggtgtctctcccttctgccgctgggattcgcggggcgcattgcttgccgggtcattcactcggttctggcgtttcaccatcgagcagccgtacaaggttttccctgtcgtaggcaggctttcgggcctgtctgctcgccggtcgccggtagaggcaatgcggtctgttgtttgtcgcgctggttgttaaagagcggtggtcgtcctgtacttgctcagaagcacaagtcggcttgcatttataaaagcatgcttgtgaattgaatgcaagcacgcttgtgtttattttgcttactgtatgtatgtacagcattcttgggaggtgaatatggctaagcagaaagggagcccggcaggctcgccgcggggagaaatgacgggcatggagcggctgggattgagggtgtcatcaatgatcaaccaccccgtggcgcaggcgcagcgctgggtgacgatccatcgcctggacaccgatggcgatcgggagtgggaggaggttctaggggtgatcgccgaaaccgacgagcttgagctgacgctcaatgacgacggtagcgtgaccgtgaggtgggagcagcaagaggtcgaggcagcggggaggggcgaagctgagtttgagcaggaagaagaggcggcacctttctagcaggcaataaaaagcccggcgctgccgggctttgacgatgggcatggtcttaaaccggcaggccgttccaaacgtacagcacgcgggccaagatgtgggtgtcatccacgcggatttcttcgatgtcgtgatgcttgttgtcggagatcattttgaagcgatccttgcctttcttctgcaagcgcttcacgtaaagcatgtcgtcgtgggagaagaggtatatgccatccccggtgaactcccggatggttatatctaccagcagcgggtcgcgatccttgatcgtgggcgccattgactggccccagccggtgatcatcttgaggtggaagtgttctttgaacgaaactcccatctccctcaagtgtttggggctgacccgaatatcctgaagcatctctgggaattcgtgcgggatctgcccgccgcccatcgctgcgcgcacgtcgtagtgggcaatccatacttcgtcaccgacctggcccgccctggagaagtcgacttgcactacattggtcggtttcgactcctgcgcaacctcttcgaccacctcggcgattcgcgctcgcgcctcttccgaaagcccccggccgtgttttgcgagcatctgcttgaccagatccgccgaggaataattgccggattttggagcgtccgtggccttccggctcggcggctcgcccttgcctgagagcagccagtctaccgtcgtgtcatagccttcagcgatagctaccaggttttcgttctttatgttgccagtatcaccggcaaaccactgacgaacagcttcgtagctgaccccgcacgtggtcgctatatcccttttgaatcctcgcggcccgatctcaggctttcgcaccaggacaagtttcgcaatccgatcagtaattttcatgcaagcaatctacaagttagcttggcaagcatgcttgcttagtaaacacaagcatgcttgaattgccgtatacccaaaggagtcagccatgaaccgtgccgacgcaattaaacatttcaaaggaatcgcgcccctcgctaaagcgctcggcatcacatatgaggctgtccggcagtggggcgaggagattcctgagctacgtcagtaccagcttgaacttgtaaccgacggtcaactgaaggccgacaaaaagaaatcagctgcataaccatttcgaacaaccaaggagcctcaccaatggcagatgaagatcgcttaaacgaaaagcacgtcaaccagatgaaagttctgctggatgacaaatacctcggacttctggactacgccgcgcaaatccacggaacgaagaagtctgttctggcccgcgaagtactgaagtcctggctgctcgatcttgttggcaattctatccgtgacgaccgggctgcctaaagcgaaaccgtagggacccaatagggaccacaaagggaccggagggcatatgccagaagaacagaagggcatggaccttgacgagttgcttgatccggatgagttgcgattgttgatggcggaggcggcaaagcgggggatgaccccggctgagttggcgaagcacggaattcagcaggagttaacgagaaggaccaggccgagagccatgagcgggacgattcaagcgttccgcaagaaagactgaaacaccaaatggcaggcataaaaaaaccgcctggcagggcggttatttcaacaacttgtaaaacacagtggggccattatgaacatcaataccgctccaggcaatacccgacctgtcgcgacacttttcgagcaacagcaaagcgtgtcgcgacacaccatgtcttcccgcgagatcgccgaactgaccggaagcacgcacgacaatgtgctgaaaaccatccgggcctacatttccaggggtgtcgtttcttcaaacgacaccccttacatccacccgcagaacggccaagtgtatcgcgagtttctcctttcccagcgcgacaccctggtggtggtctccggttacagcgtcgaactgcgcgcccggatcattgatcgctggcaggagctggaggcgagggcggatcagttccagattccggcgacctacgctgaggcactgcaggccgccgccgaccaggccaaggagaaccaatcgcttcgcctcgtgatccttgaccaggcgccgaagatcgctgctatcaagcgactggcgtctgcctgcggctcgatctgcatcagcgatgccgccaaacaacttcaggtcccgccctcgaggcttttccagtggatggagaagaatcggtggattttccaccgcggcgggtccaagcgttggactgcctaccagcctcgaatcacatccggctatctggtccataaggtcaccgcgctgaaaagcgacccggagaccggtggggaccgtgccgccttccagcctctcgtaaccccgaaaggcctggcctacctggccgaaaagaatatcggagcctcgctgtgagtgttcaagcaatgtcctgggcgctctctctgcccactgaaaccctaaaagactcgagcgcgcgtcacgtgctgttgtgcctggccaactatgccggttcgaacggaacaggggcctttccgtccgcctctaccctggcccaggacacagggctttccgagcgcactgtccgttacaagctcgacgacctggaacagtccgggctgatcaagaaaggcaaccaggcgatcgccgcggtgcacattgatcgccacgaccggcggccgatcgtctatgacctccaaatattgcggggtgcaaatcctgcaccccgttcaaaacggggtgcagatgacgcaacggggtgcaactcacaacagaacggggtgcagcctggaacagaacggggtgcagcagctgcacccaatccatcacttaaccatcaaggaaccgaagagcagcagcagcgcgagctttcggacttgatcgatgagcaggagcgccaggcgctggacccgcaggatgatcgccagcgcttcgcaatgtttgctgactttgagccctcggtagatgcgctgcagacccagctgaaaatcgccggtctgccggctgacgccctgaccgccgaactgctgtcgggcttcaagggtttcttcgtcgccaaaacatccgttctcgataccgccggcggctggtgtttcaagctggttggctggatcaaacgagaacgtgcccaggccaccggaatatccaccagcgaggaaggttcagccggtgaagactgggcagcgaagggggtgcgcctgtgaaccgatcaaacaaacctgttgtggcgagccagctggtaggtcgccgtcaatgcgatcccgcctaccaaggccctgatcaatccccagtcgtggtggctgttgacccagctacccaggcagttatcgacgatctgttcctgcggctgcgcggggcgtgcggcgcctggcgccagtcctggcccaccgaggccgtcatgaacgcttcgaagcttgagtggttgggcgagttcatgcgctccggaattactcggatggagcagatcgatcacggcatgcgcgtcgtgagtgccagcaaatcggctttcgtgcctgcccccggcgttttcgtcagctggtgtttcgcccctgagggcctggggctgcccagcgttgagtctgcttacgcccaggctcttcgaaactgtcacccggccatgcgtggctgcgaaaagtggtatcacccggccgtttaccacgccacggctgctgcgggcttccacagtctgtcgctgctgtctcgcgagcttggaatggcgagcttcgaaaagcactacttgatccagtgccggcgcatctggcagggcgagcagttgagctcggtgccggtggcggaggttggcctggagcccaggataactccggaggttgggaataaggcgttggccgaattgcgcgcccgccgcgccggtggtgcccaatgagcaagctcacgaatgccgcacgcgatcgagactgccaggttcggtttccggggtgcggctgcaactcgtccaccaccgtcctggcgcactaccgcctggccggcacctgcggcatgggcatgaagcccaacgacttccaagcggcctgggcctgcggctattgccacgacatcgccgacggtcgcctgcgcgcacccggggagctgaccaaatacgagatccgcttgttcctcgctgaaggcgtcatgcgcacccaggacatcctgatcagcgaagggacggtgaagctttgaagctcaaagacaatatggaaattcaggctgaggcactcaagcgcatcggattacctccccgaatggatcctgcgtcactgactactcctaacttttaccgcttgcttgagcaaatgactgttctcaaagagcgagccggcccctgccagaatgtggtgatctgcagcgcctgctcagccgtgcacgactgcccatttggtgcgcatcacgaaaatgctttcgatcatcgccgcgtgtgtggctcgtgtggcagccgcgctggctttcgtgatgtggtcgggcgctgggttactttttctgaaacatggaagccttggacctgggggacgggctgctgggcattcgatttctgcacttctcccggacatcagccggatggaaaaaaggtggcagcgcaatgaagcagctcaccgtgaagccattcagcccgaagccggcgcgggccaaggccgtggaccgtgagggtctggagcaggccgccttgatcaaggaaatcagcctgcgctatccagccgccgcgaagctgatctaccacgtcccgaacggtgggcaccggcacaagctggtagcggtcaagctgaaagagcagggcgttaaggctggcgttcctgacctggtgctgcccatggcccgcggtggctacttcggcctgtacatcgaattcaaggcccgggctccgtatgacgccgccgtgtccccggcccaggacgcatacctgcaggcgctgaccgatcagggttacctggccatcgtttgccgcgggcacgtcgacgccattgaggcgatccgcgcctacctacttcaaccacaaacgagggctgcagcatgagccataacttcaagcccggcgacctggcactggtgatatccggagggtacatgggcgagacggctgaactcgttcgattcgtgctgccaggcgaggtggtggtctctccggtgacagggaagaaatatcagttccgcccagctgcgggtatcggggggtggatgtgccgattccggggtgagtgggcaatcaagcacgagaagaatctgatgcccttgcgcggccagttcacccctgagcggctgaagtctcacgaggtgcccgcatgacgaccgctgccgtgaagatcaccgacgccgaaatcaagcgccaggccgctggcgaagctcgcgaccttcgcgatatcgaggcccgaggcctgtatctgcgtttcgcaaaagaccgcgcccgggcctcctggtacctggtggtcagaggagagtggaagctgatcggccggtacccggacctcagcgctaagcaggtcgccgcagcactgccaggcattcgcctgcggctggatgccggggaaggttccaatctgtccaagtggctgctggtgggcgagctgctggactggtacgccgatcgcatggcccgggaccggagcctgtcgagcaagcgcaagaagaccggcgcctctctgatcaagtgccacctgaagccactgctcggcgctgtgccgctggcctcggttgataaatccaccctggatgaccggttcatgtggccggcccaagagtccatcggcatcgactatgtgcgctcggcgttccaactgctggccttggccttccgccaagccttcaagctgcgcctgatcaccagcaacccgatgaaggacgtgaagttcagcgacttctcgaaggccaaggtcggggtgaagccgtcgcggctgcgtgttacccagctccaggacctcctggccttgctgcgcgactcaatggccagtgccccggctgacgccatgctggccctgatgatgctgtgtcacggcacccggatcggcgagacccgccaggcccagtggtcgcacgtcagcctggcagagcgtgagtggttcattccagccgagaacaccaagaccggcgtcgagaaccacctgccactgaccgaccaagttcgccagttgctgatcacctaccgcgacatccagtgggccggcggctatgacggccagttcctgtttccgtcccgcaaggcaaaacccctcagcgaaggtcaggcgtgcgccgtgttcacgcgcctgggccagggtgaatggacaagccacgacctgcgcaaggtggccaggaccggctgggcagacatcggcatcgaccacctgatcggtgaactgctcatcaaccacgccatgggccacaacgtgaaggtgtacatccagtcggacgtgatggcccgcaagcgtgaggcgctggatcggtggtgtgcgtatctagacgcgaaaggtttcaagcgcattcacgacttgaccggctttagattgggagattccggtaatgccccggaagccgcagaacataaggcctgcgaggccattcaagaaacaaccataggcgaggtttaaaaatgctgattcagatcctaaagcgcacccggctcgccgtgaacccggccgatatcagcgccatcttcatctacaccgtgaatcacgatccggtccttgaggtgcgcatgcggggcggcgacaagtaccgcgtacatcacgaacctcgtttgccgaatggcgacgacgtgtaccaggtccacaagcagttgctggaggccaaatgaagaaatcccacggcccagcattccgcgctgcgatgcgcgacctggccaagtgccaggcatgccgtggtcgcgcggtgatcaagggcgtcttccatgaactggcctgcgtgcagtgcaacgcctccggctgggtcaccgccgaaaccggcgaggcgctaccgctggaggtgctggtgacgcagctgagcattcgtctccaggccgccgagcatcagatcgcacagttcaaatgcttcaggcctgtcggtgctgaagcgcagtacaacgagaacaaccgccgtggcccaggtgccaccaacttcacaggggattgagccatggccttcacaccgagctttagagagcgcaccgccgaggatctgctggagcattggggccgctgggttgtcctgggctcaggtgtctcctgctgtgcatcccatgagaacaccatcctgtcgccgatgatcaccgacgacgatgcactgctgatcgatgggctgatgggccgccttctcaagcgctaccccgaatgcggccaagtgctgatgaagtactacacgtctcggaatgcatcgttgatggaggtcggcaaggaagttggcaaaaaaatgggcaagaagatgggcttcggggaagagaagacgcgagggctctggaaggccggtattgcctggattgatggggctttagatattcgccgtcaggctgcttgacaggaccggggatgatatatagatttcagttactttgcggtttttccgcgagcaaagcccgaccctagagttgggctttttgctttctggagatgatcaaagcccggcggaaacgtgcaggggtaacagtcagcgtggggactggagggaaacgccacgacagagacctgacagggtctccatctccacctataacgagcctcggcatttgccggggctttttcgttttcggctccaccacacccatcgctatggctgggagtgctgctgggaccgaatttaacttcaggcctcaagcggcctcgacagacaccgacaggcgcttaccgagagcagccagggctttctcgatggcttccatcttcgaagtgtggaggaagtccaccaggcgatcgccctgtgtctgggccaggcccaggagtcggcacagatcggctttgcgcatatcgtgcgccatcatctcgttccacaggacgatcttcgccacggtaaccgccggaagacgaacaacgtgttcgcctggttgtgctggtgatgcctgcgggatggcttggcgctgatccacgtagatggacagagtcgtttcgatcgcgtccacggcctcgctgatagcgtgttctttgtcatcgccgtagctgttgagcaacggcagatcgcggcaatagacagccaggcctggtgcggtgtcttgttcaaagcgaattgcatagtcgtacatggtcactccctggaggtgatcgctcagcgttcagatgtggtgaaggggctctcagagccccagttgtttaatgatcgccttgcgggtcggttctggcatttccttactaccgtgatccgcgaaggtactcctgttgccgtttggggcgatgactttgaagtggcttcctttacctgcttcgaaggtcaccccttgggtcttcaaccatcgtctgaactcgctgaacttcatcacctcgcctcgttgtttggatgaggctagtttaccactattttgtggtagtacaacaattttgtattattccttttggagattccaatggcagaaccagcaagcactgctgccagcgtagtgttggtcaagtacggtgtggttatggctgctttcatcggttcgattctgtctcttggtttcctgaaggacttgacccgagggcaggcggccgcagccgttgtcaccggatttttcttttcgatgtacctgactcagcccgtcacgatgtggattgcgccaaagctagacctcgaggtcagcgactacctgttgtgtggtgtgtcttttgtgctcggcctgacagcaatgaacatcatcccgggcatcaaggcagctctggggacgttcgtcacagcgcgaggcgtctgacatgaacaacttccttacctccgcgctcacggcgatggatatcttcttgtgcgtgcttgtggtgatcgctgcatgcgactacctccgccgcgtgcgtcccgtcgatcagccattgctgtgcaccgccttctacctggtggccattggcgcattcggcgggtttgtgaccgccattcaggggcactgggtcaacccgttcggcgtgatgcttcatgcaggcgtggtgctttatgcctgggcaagacgcggtcatgtattccagtctgtttcgtaactcgccaattggcgatcatttgaaaggagcctgaaatggccggtaaaacagatgtgaagtcgcaggaaaacggggataagcagtctgagtcgcttcaggtggctacgttgggcgaggcgatctttacgccaagcgttgccggccaggcgctggctgatgtcctggtcgctcgactgacccatctcggtgcgtctgaattgctggccgatgcgacagcttgtggtgtggccgttaaagccgcgttcgatcagctcgagaaagcagacgaaggcaagtagtcgttatgtctggggcttttgatatttcggtccgtgccaatgtgaaggaaatcaccaaatcactctcggccttggcatacaagcaggttgccttcgctactgcgcaggcactgacggccctggcgaaagaggttcaggccgacgagatccagaacattgcctcgaccttcaataagcccaaaccgtttacccagaagtctgttggtgtgcgaggtgctcggaaggacacgctcacggctacggtgtttgttcggcctattgccgccaagtacttggatccttacgagggtggtggtcgccacgtgctgtcgggtcgagcgctctttaacccgaagaacatcaagctcgaccaatacggccaactgccccgcaaggtgttggatcggttgaaggcacgcaaggacatcttcatcggtccggtgaagtcgaagtccgggacagtcaacggagtctggcagcgtgtcccagccaagcgtaagcagccggctcacttgaagttactgatccgcttcggcgattcgcttgccgtgaacaagcggctgaactaccgaagccgagcgaaggctctggtagatcgcaggttcaacgcagtgttcggtgatgctatggccaaggccctggcgtctgcacgctgactggcgcgacgtgaggggccggggtaccccccccatgcttgggtccctcctgagaccttcgacatcgagggcattgcgcgcctcgatgtcgccccagctatgaagtctcaaaggtgttcgcacccaggtccaggccatgaagcaaggtatctcgattcgtgaattcgcgcggcgtgaaggtgtgtccgacacgctggtcagaaaagcgctgaagctcaacaggctcaaggcttttgacgatggctcgattgatcctgacttggcgggaagcaactggcgagaggggaacgccaagggtgcgaaccctgcgaaccaaaatgcgaaccctgcggttcgcagttcgcacttggaggttcgcagttcgcagagtggtgaaggtgacagcgagaccttggaagaggaggccgcccgactgcttgaaagtggcggggtggccacgcatgactacgccgaggcgttacgtcgtaaagagaactacttggcgctcctgcgccaactcgagtacgagcaaaagtcaggttcgttggttgatctggaggtcgccgagaaaatcctatttgaacaggccagggcatcgcgtgatgcctggctcaattggcccacccgtgtggggccgcttcttgctgccgatctcggccttgaggctgatcgtgtggttggagcattgacggagtatgtccacaaacacatcagtcaactcggcacgccggaagatgaggtcgagttcgttagcgaaagctgaccgcctgcgcctggcttaccatcagggctggacgccgccaccgcgtattacagttcccgactgggccgaccgctatcggcgccttgcaaaggaagcgggcgcgatatcaggcaattgggagacatctacggttgaggttgcccggggcccgatgatggccgtgacagaagccggcgtgcacgtcattaccgtgatggtcagcactcagctgctgaagacggccttgctggaaaacatcttcggttactttgcacaccttgacccatgcccgatgttgctactgcaacccaaagaggcagcagccgaacagttttcgaaagagcggatcagccccttggtacgcacgacaccggctttgcgagctctaattggttcgggcaaaacgcgctcatctgatgagaccttgctctataaggcattcccgggtggcttcctggccttggccggtgccggtagccctgacaaccttgctcgccggccgatacgcatcctgttgagtgatgaggtcgataaatacccgattacccgtgagggtgatccgatcatgctcgccgaagaacgaaccgccagtttcggcgccaattggttgtcggtgcgggcgtgttcgccaacggtcgaggatgagtcgcgaattgaaaaaagtttcctggcatcggatcagcgccgcgcatcgattcagtgcccaggctgtggtcatcggcagtttccggacttcttcaaacacgttcattggcaaaaggatcaggaaaccggcgcccataagccgaagactgcgcgcatgtactgcgaggggtgtggggctgaatggtccgagggtgatcgcctcaagtcattgcgcagcattcgttggcaccagaccaagacgttcagctgctgcggtgagcgacatcagccgcttgagatgtacgacgctgcctggaacttgtcgcgtgaaggctcggtagatcgggtctggaccttgtctgaaagtccgagacattcggtgtatatggcgcgctgtccgacctgcggcagccaccctgtcgacaacgaacacgccggattcaccgcctcgaaactgtacagcccttggtcaaaagacaagccggcggatatcgccggcaagtggctggcctgtggtgatgatgaggaaatgaagctggcgttctacaacacccagcttggtttgccgtatcggaaaaactcgggccgcgagattcagattgaggcgttggctgctcggtgtgagttgtggggggctgaagtccctgatggcgttgcgctgattacggtcggcatcgactgccaggattaccgcctggaaatggaggtgatcggctggggtgtcaacgaagagtcgtggtcgattgattaccacgtcatcgagggcgagtttgatcagcctgagacgcaagcgttactggacgcttatctcaagcgcatctggtaccgcgccgatggatacgccttccctgtgatggcgtcttgttttgactccggtggtcaccacacccaggcggtgtatgacttctgcaaggctcgtattggtcggcgtgtctgggctgttaaaggtgagtctgctcgtaatggcaagcgttcgccggtctggccgaccaaggttccaagccgccgaagcaaggcgacttatcgtccggtgatcctaggagttaacgcggcaaaagacaccattacaacgcgactgatgaaggacaaacccgggcctggctacatgcacttcccggtaagtcgggatatcaactacttcgcacagctcactgctgaacgctcaatcgtcaaggtgacgggcggtgtgaagtaccgagtctgggagcctcgtcctggtcgtgcgaacgaaggccttgactgtcgggtgtatggctatgccgcgctgtgcggcttgctgcatatgggcatcaagctgaacaggcgggcagaagaggtgaatgcgtcaatcgggacgccggttcaccgccctgaaccgcaagaagagccaaaggttgcggaggcgcggcaggatcaggcctctggcccacgtgtcattcaggcaaaacccaccaagaaaaacacgttggccagccggctggcgtagatcttcccccgcttcggcggggcatacctggagttatcccatgagccgttacggtccaagcagcctgttggcgggcataccccgggagtcgttgcaggtgtctttgcaaaatgcccagcaggcctacctgcagctttcttcgggcggaaaggttgaaaccgcgacgtacacccaaggagatggctcgaaaagcatcacctatacccgcgccaatattgcccaactggcaaacgttatccagatgcttcagcagcagctgggcatcgtcacccgagcccgtcggccactcacattcaggtttaagtgatgaccaatccggtatcgattgttgggctcgacggcaagccgatccagcctctacggccgagtcgggggaaaatgctggccccgggtggcggtgctccctacgacgctgctgacatccacggggaacacgttgccgggtggagtccctaccttggttcgcctgatggcgacctaaacatgtaccgcgaccgcatcgtcgctcgggtacgtgacctagtgcgcaacgatggctgggcctcgggcgcggtcacccgcattctggacaatgccatcggcgggcacttccggccgctgatcaaaccggactggcgcgcactggcggcgtacaccggcaaaaaagcgtttgatgcgacatgggcgcatgagtttgcccaggtggccagcgcgcactatcgaacctgggcctttgacactggtcgttattgcgatgcgcagcggtcgctgaccatcacccagatgatgcgcttgggctttcggcacaagttgattgatggcgactcgttgattcaggcctgctacatcccggaccgggttggccttgggcgcgctcgatacgctacagcgatgcaactgatcgaccctgaccggttgagcaacccccagcagcagttcgactccaactcatcgcgcggcggtgtggtgctcgatgagttcggtgcagctaagtcctattggattcgcaaggcgcaccaaggcgactggtggaacgccgctgacagcgtgacttgggaggagatccctcgggaaaccacctggggacgtccagtcatcatccacgattttgaccacgaccgggcctcacagcaccggggtggttccggcatttttgcgccgatcctgcagcgcatgaaaatgctggccaagtacgacgcggtagagctggatgcggcggtgatcaactccatttttggggcttacattgagagcccgttcgatcacaacctggtagccgaggcggtgggcgacgatgacaacctgtcggcttatcaaggtcagcgggcggactatcacgcaagccgaaaaaccatgctgggtgagtcgcgggtaccgatccttttccccggcgaaaagatcaacgcagtgaccgccacgcgaccgaacgcgaatttcgcggggttcgagaaatcgttcctgcgcaactttgcctcggctactgggctttccgcgcagcagatgtcccacgactggtccgacaccaactacagctcggcccgtggcgcgttgctggaggcgttcaaaactctgacccgccgtcgcaacgacttcgccaataacaccgcccagcccgtgctgggatgtttcatggaggaatccatggaggttgacgactacccgctaccacacggcgctccggagtttatggagtgccgctccatgtactcgcgtgctgagtggatggggccggcccgtggctggattgatccggtcgccgagaaacaaggggcggtgctggggatggacgcaggcctatccacgcttcagcaggaatgcatggagcaggggttggactacgaagaggtgctggagcagcgcaagcgcgagatcgacaagttcagagagcttggcattcccgctcctacctgggccggcatgcagatccctggcggatacacatcggcggacgacgccatacagaaaccgaggccgacttaatgcaatttggacatcttgctcaacggctcttcaacgtgccggtggcgatccgcccggaaaaggccgaggtcatcatggccgccctggccgaacgcatggggatcggtcgaattatgcgggtcagcggcgatgctgttgacctgacgccgctggcgctggagggggacgggtacagctacgccgaccgggagtctcgcgatagcgggtatgacttggtaggcaatgtggcggtcattcctgttcacggcacgctggtgcagaaaaccggcactctccggccctggagcggcatgacgggctatgacggattgcggcaagccttcctgactgcgctgtatgaccctcaggtcgctgccatcgtcctcgatgtcgactcacccggcggcgaggtctccgggtgtttcgacctggtagacacgatctacaacgctcggggctccaagccaatctggtcgattctcaacgagtcggcttattcggcggcctatgccatagccagtgctgcggatcggatctacgtcccgcgcaccggcggcaccggttccatcggagtgatttgcatgcatgtggatttttccaaggcgctgacatccgccggcattcaggtgacgtttatcacctacggtgaccgcaaggccgatggtcactcggaaattccgctgtcggctgatgccttggcgcggttccagggtgatatcgacgccatgggcgagctgttcgtagagaccgtggctcgtaaccgaaacatcgcggccagcaaggttcgcgcaacccaggctggcacctatctcggttctgccggggtggatgctggcctggccgacgctgtcgcggcacccgacgccgctttccgggcattgctctcccagctggcctagttcccaccgtttagaggattgataaccatgaccagaagcagaatgaccgctgctgcatccttcgcgcacctgctaggttttgccaagcgcgccgaagaagacgatgacgagaaagacaaggcgcgtcgcgcggaagatgacggcgacgacgaaaagaaggatgacccgaaaggtcgcaaggcaaaacgtgccgaggaagatgacctcgaggacgacgaagacgacaaaaaggcacgaaaggccaagagcgaaggcgatgatcctgacgacaaggacgacgccaagggcagtaaagcaaagcgcgccgaggacgaggatgatccggacgctgaggatgaggacgatcaagacgatccgaaatccagcaaagctgcagttgccaaggagcgcgcccgttgcgctcagatcatggctcacggcctgaagtccggcaatgccgaacaggctggcgtattcgcgttcgacaccaacatgacggctactgcggccatcaacgcgcttaatgctgcggggtcggtcagtggtcgtggtggaaacctgaaagaccgcatggccgccgcaaacgtaacgaatgtcggcgccggcggtgacggtggtggcgagtcatccagcttgtcgcccatcgcccaaaaaatcatcgcggccgccgcccgtgccaagcctcagtaacctcaacgccaaacggagatcaacagcatgtcgctgattccaactgaaattcgagacaacccccaacgaccaggcgttcaggcacaggtgtatatccctgatcagttgattgccgatgctcgtaatctggtcacccagccgatcctgttggctgctggcgtgctcaagcgcggtacggtattggggcaacaaaccgtcagtcctgtccaggtcatcgccaaaccaggcaataccggcaatggcacggtggccccggtcaccgttggttctgccgttgaaaccggcggctacgcgctgctggccacctcggctaccgtcttcagcgttaccaaccccgaaggcgtggtactgggtgatgcaactgtcggcactgcgtttgcgcacgccgagatcagtctgacgatcactgcaggcgccacggcctttggggtcggtgatggctttactgtcaacgtcttcgatgtggtcggcacctatgtcgagtgcgtccggacggcatctgatggcagccaggtcccggtggccatcttggtcgacgatgctgatgcaacggatggtccggtaacggcaggcgcctacgtggccggcgaattcaacgccgctcaattgatttacagcccaacctggtcgcttccagcactggtttcggccatgcgcccgtacagcctgtttgccaaaacctcactctcggcggcgtccccgtcgaataactcggcgccgtaatccggcccataccccgccatccacaaaggcccgctgatgcgggtttttttgtgggttggattcagcattttttgctttggagaggcccatgaccgccgccagttcgtttccttttagtaccactgacctgattcaggtcgtgccgacgctcaagcgtccgcagaaattcctgctcgacaagttcttcccgaacattcagagctccgagaccgaatttgtcgccatcgacatcgatgtcggcctgcgccgtatggccccttttatcagtccgctggtgcagggcaagctggtcgagcagcgccgctaccagaccaacacctacaagccggcctacatcaaggacaagcgcgccccggatctgcgtaagccgatcatgcgccagatcggtgagcgcatcggcggcggcaccatgactgctggtgagcgcgagatggccaacgtggcgtttgagatggccgaccagatcgacatgctggatcgacgccttgagtggatggcggcatcggccatgctcactggcaaggtggtggtttcgggcgaaggctttgaaaccgaggtggtcgacttcggtcgcgactcccagttgagcatcgcgctttccggcaacaaacagtggggcgtcaaagccaacttcaaccaggcaggccgcgacaccgtcccggcgaacaacctggaagaatggcaaacgttgatgctccagctctccggggcccaggcaacggatctcgtgttcaccacctctgcctggcaggccttctccaacgacgagaaggtgttcggcgccatcttcttcccgaaacagtccgaggccgggagcatcaacatcggcccacagatcgctccgggcgcggtttacaaaggccgctggggtcaatacgacctgtggctgtacaacgagtggttcattgacgacaacggcgttgagcagccgatgttgcccgacggctacatgctgatgtccggccagcagctgctcggcacacgcgccttcggctcgatccttgacccgaatttcaactaccaggccatgccctatgcgccaaagacctgggtcgagaatgatcccgctcaacgaattttgctgatgcagagctcgccgctggtcattccaagtcgcgttaacgcctgcctcgccgcgaaggtctgcactccgccgagcaaaggctgatggctggcgcacccggaacgggggcctctgttgtggaggctgtcgtggcccatggccgaaccgtggtcggcgtcaacggcaaaaaggttgggcctggcgaaaccgtcaaggtgccaaaggacgaagtcgagcagctgacaaagcttggcttcttggccgatggcgacgtgatcgagaagccgcaaacagggccgcatgtctctgttgcgtcagggccaaccgtgaggatcgcctgatgatcgactgggacagcttggtattggggccgctggaaaccatttttggcgaaggtcagcgaccggaggggcaggtgatttactacccggccgggcgccagggataccccatcgacggcgttttcgattcggcctatcgggaggtcgaactgattgaccctctggtgggcgttacatcaacgcagccggtactgggtgtgcggctttcgacttttcgtgagccgcctgttcaggatgatgagatttacatcccgagcatctccaagcgctacctggtgatcgaggtccgacctgatagccatggttgggcaaaactgatgctgagtgagatgtgatgaccacgacttccgagttgcggcagataactgccgaagccctaaaggtgggcactgctgctggcaacaacgtttttgcggccaggacctggccgacctggagcggaagttatccgatcatctggctgcactcaccggcagaagacaaggaatcgctggggcgccagggaggcccccagttcaccgtgacagcgacaattcggatcagtgcccgcgttcaactcaaggccctgccgaaaaacgcagctgccggggcgatgatcctggccctggaagatctacagcgtcagatcgaaagagcgctgatcaacttccccccactcatgagtcggttacagcagtttcctttcatccggtctgaaatggctgatagcgatgacggcgatcagccgattggtgagctcgtcatggatgtcggcatggagttctaccaagggccggaagacttctatcagttggaaggtccttcggtgccagcaccctttgatccggccgcagaggttgcaggcgtacagccgatcgttccactggagggattcaacgttaccgacgatttgctcaacgtatttgatccaactggcacttatgccgatccaccgtttcccgattccgtcacgccggcgccgcgcactgttggcccggatgggcgagcagaaggtggcctttcgttcgattttccgcaggagtaatcatgcgcatttatccctctcctgggttgctggtacgcgacccggtcaaacgtgatgctctgccggaagaaggtcgagaggtcgcggacaacgaccactactggcttcgccggctcagctgcaaagacgtgacactcacggcgccgaaggtagtcgcggcgactgagccaccgccggcggacgaagaaaaaccggtaattgccaagggcgccaagcctgaaacctccaaagggagcgacagttaatgaccgtcccatttagcaacatcccgtcgaacctgcgggttccgctgttctacgccgaggtcgataactcccaggcgaacagtggggcgcaaactcaacgcaccctgattatcgggcaaatcacggccaccggtaatggtgtggtcaatgttgcggtgcttggtcagggcgtaagtgatgctcaggccaaaggcggccttggctcaatgctggcgctgatgactgcagcctacaaggcttctgataacttcggtgaggtgtggttcttgcctctggccgatgccgaaggcgccgtagcagcctctggctctttgctggtcgctggcaccccgagtggtgcaggggttatctcgctctacatcgctggtcagcttctgagcttccctgtatccacggctgagccggcggcggacatcgccattggcttggctgctttggttaatagttccagcaatctgccggtaacggctgaggcaaccgatgcaaccgtgaagttcacggccaagaacaagggggccgccggcaacgacattgacctgcgcctgaactatcttggctccgcaggtggtgaggtaacgccggccggactgactttgaccattaccgccatggccgccggggcaaccaacccggtactcgacacagccttgtcgagtttgggtgatgaggcctttgacttcattgtcagcccgtacaccgacacagcatcgctgaatgccctgaaaaacctgctcaacgacaaaaccgggcgctggagttatgccagccagatctacgggcacgtcttcgccgcccagcgcggtacgctcgcgaccctggccacagcgggcaatgctcgtaaccaccagcatgagtcgatcatgggcttctatgactcgccgtccccggcgtggatttgggcggcagatgtggcgggctctgctgcggtggcattgcgtgctgacccgggacggccgctgcaaactttgacgttgagcacagtgctggcgcccccaccgaagtcacgctttgacctcggtgagcgcaataccctgctatgggatggtatctccaccttcacagtggccagcgatggcactgtggcgattgagaacctgattaccacgtatcaaaagaacggctttggggcagcggacgacagttatctgcagatcgagaccttgttcttgctgatgtacgtgttgcgtgctcagcggtcgttggtgacctccaaatatgcccgggtgaagcttgcagctgacggcactcgctttgcgcctggctcggcgatcgtgacgccgaaaatcatcaaggccgacttgattgctcaatacggatcgatggagtacgacgggtttgtccaagatgccaaagccttcgccaaggaactgatcgttgagaagaaccgaaccaaccctaaccgagttgatgtgctttggccggggaccctgatcaaccaattgcggatctttgcgctgctggcccaatttcgcctgtaacccaggctattcgcccatcgccgccttgagcggttttttttcgcctggagaaaattatggctgaccccaaccgccttgccggtacctgttacctgactatcgatggcgtgagttacatgctggccggtgacttctcttacaagatttctggggtctcccgcgaaaccttgaaagggcaggacggtattcacggctacagcgagaccccgcagccgggctacatcgccgctacgctgcgcgacgcctcgaacctgagcattggcgacatcaatgcgatgaacaacgccacggtcgtcgccgagctggccaacggcaaaaccatcattggtcgcaacatgtggaccactgaccagcaagaatctaaatcttccgacgccactattgaagtgaagtgggaaggtccttctgttacggagaattgatccatgtttgaagacgaaatcaccatcaccctgagcaagcccgtggtcatcggcaagggtgaaaacgcgatcacctatgaagagatcaagctgcgcgagccgaccgcaggtgagatggaaaaagctgctcgcgcagacacctccatcggcgctgcgatcacgctgattggtctggtggcgggcattccgcgtagctctgttgagaaattcagcaagcgtgatctggtggcagccaacaagttcttggagggttttaccgaagctggtcagccggaggaggctggccagagctgattgccgaactcaccaagtattacggctgggggccacgcgatgcgtggtcacttactttgaaggaactggtcgaatggaacagacaagccattcgcatggcgggtaactcagatggctaataccttcacgatcacgatcaacgcggttgataaagcctcggcgaccgttcgcaaggtcaacgactctgtcagccgcatgacccgaccctttgaagaggtcggtaagtccttcaaaagcctcggccgtgagctcggttttgagcgtatcggcaagaacctcaccaatatcggcagggaggcgggcggtgcagctcgcagcatcagcaatatcgttgctccattggcgacgatcactggcattggttcggtggccggcgtagcagcattggctgtcaactgggccaagcttggaaggtcgattgacagcagtgcacatgggatcggtatttctgctgatcagctgcagaccttccagggtgccgccaagatggttggcattgataccgaattggctactggcagcctcaacagcctggccaccaccatgcaggatgcgcaatgggggcgcaatcaaggcgcgctattgatgctgaacaagctcggcatcggtctgaaaaaagccaaggacggctcctgggacgtggtgggcgagtacaaggccattgcgaacgcgattgccagccagaaaagtccgcaggttcaagccctgatagcgaacaatctggggctgggcggcatgctgccatttctgcgtgagggcgctgctggtattgagcgctatgaagccacggtgaagcggctgggctacgtcatgagtgacgatgcggtcaagcgtggcaaggagttctcgcagagcttgtcaggtctgaaccttgtgatcgacggaaccaaaaacgccatcggggataagttgatccctgtcatgaaacccttggttgaccagttcaccaattggctggcggtgaatcgcgacttgattgccagcgatattggcgagtgggccaaaggttttgcaatctggatcaacaagattgattggaaggagatcggcgacgggatcatcaacttcgggaagggtgtcggaaaggtagttgaatggctcggagggtgggagaacgcggccttgctggtaatcggagtgatgaatgccggcctcattggcagtgtcctttcgcttggtgcgactcttctgcgcggtggagcgggagtctttgcgttcaccaagcttttgctgggctgggaggcagctgcgattgccgccggcgctgcaactaccgctgcgggtacggttggcgctggagttggcgggagcgccgcagcgggtgcaggtgttgctggtgccgccggggcaggctttggagcatggcttgcagctggcgcagccgggctgggtgcgatgttctattcgccgaccttgaacgacggtgaagacaaggaagtttcgcgaattcgtcgcgcgcaggggcttccggaggtttctgcgtctgaggtcctgagtaaggcatggaaagcgcagggcggactcaatgaagactccaccaggcgctcgatgcagttctttcagaacaagggctggaccaaggaacaggcggctggtatcagcgcaaacctcggtcttgaaagcaactttgacccggcggcagtaggcgatagtgggcgcgcttacggcattgctcagtggcacgattcccgccagaaagagttcgccaaatgggccgggaaacccataaaaaactcaaccttggatgagcaacttggttttgttcattatgagctgaccaagggcggagagacggctgctggtgatgcactgagggcgactaagaccgcggctgctgcgggtgatgttgtaaccaaaaaatatgagcgaccctacgacatggttggcgatgccgccaagcgtgccgcagtggctgatatattggcgagctcggcagtagatctatcgagatcgccggcagccgcgccaatgccgactccgcaagcggcacctgcgtcggcgaaagcacccgaaggaccttacacccaaggcgcagcccagactccagcaaacgggagtgtgaaggtggaggtcgaactcaaaaacgcgcccgaagggtcgaaaaccaaggtcaagtctgacggcaacgtccaggcttcgagtcgcatcgcttactcgggaatgggggctattgcatgagtttgctgtcagacatcatccagatcgcccaagactccaacaaggcttggccggagatgctcaacaaagcctcgtatcgtggtgttccatttgcggtctatgggggcgatgcgcgttttggccgccggttagcgctccacgaatacccggggcgtgacaagccctacatcgaggacatgggacgctcgacgcgtagaattcgcatgagcggattccttgtgaccgacagcctggtatatggcggtggtaacgtcctggcacagcgtgatgccctggtagcggctgttgaggcggcggggccgggggcattgatgcaccccaccctgggcgcactgaaggtcagcgtcccctccgaggggctgagcgtgatcgagcgctgggacatggggcgatactttgaaatcagtatcgtgttcattgagtctggtgatcgggtctttccctcaataactacctcgactggctcgctgctggacaagcttgctgctgctctgggcctgtcttcagcgctggactttgtacgcaaggtgatcggcggtgtcacggccgtgatcaacgcggtggaaggcgtcatcaagttcggcaaggcgattgtcggaatggtgattggcgtgattgcagactttaaggtgctggtggggcgcatcacccgagacgtgcgaagcatcaccagcttggccagcttgctgactggtgactttggacgctacgccaacggtaacgtcagcagtgcgctctccgtcaacaaaaaggctaagaacagcagtgcaacaatggctgatctgatcgccaagaacacggccaaccgtgcggccgtcgatacggctatggatcggctagtcaacgctgcagcgagcctggacgcgaacagcgggcagcaattcaccgattcagtccaagatgtaatggatgcgctggttgccagtattgccgacccaggcgatgcaattgagttgcttggctcgttggctcgttatgtgccgctaccggttgccggtagcggcggcatcatcggcactgcccgaaatattgctcaggacgctacaagctcgctgctgaggcgcgcggccctggcctctattggcaaggtcgttgcgacgtacgtgccgacctcctacgacgaagccatgaccaccatggctacagtgaccgattttattgacggggagcttttggtggcaggcgatagcagggacgatgaaagctatggttccttggttgcactgcgccaggccgtggtgagcgcgctgaccactaccggtgccacgcttccgacgttggagacgtttagctttcgcgctccaatttcagcgctggccatggccaaccggctgtatcgggacacagggcgcacagatgagctgattcagcaggccaacccaattcacccggcgtttatgccaacaaccgtcaaagccctggcccgctagggtatttcccctgttcgtattcatgaggtctcccatgcaagatgacgacttgaccatcacgtcgggcggctttgatatcgccggctggacggatgttcgagtaacgcggggtatagagcgcttgcccagcgacttcagtattggcatgaccgagctttacccaggggaatttgaccggcttgaactccctccgggtgctgcgtgtcaggtgcgactaggccaagacctagtggtgaccggttatgtggaccactacatcccgagcatgagcgcgggtgatcacgcggtacacgtcagcggacgctccaagtgctccgacctgattgactgcgcggcggaatggcctggcggacaactgagtaatcaaaccgtactcgggatcgcccagcgccttgcggcagtttacgggccatccatcaacggcgtcgccgaagggataccggttgcaacggatgtgagtgacctgccggtactgccccaggcaaacctgatgttgggtgaatctgcctttgacatcatcgacaggatggcgcgtttctctgccgtgttggcctacgacctgcctgacgggagtcttttcctcagtcgggcggggacgcgtcgtgctgccagtggcttcgtcggtggcgccaacgttgagagggcctatatcgacttttcaaccgaccagatctattcggactacaacgcctatatccaatcggtcgacacgtttaccgaccttgggcagggcgggaaccagatccacacggtgagagacctcaactgcaagcggcatagggcgctggtgatcatctcagagggtgggggcctgggtaatgatgtagccatcaagcgcgctgagtgggaagcagccaggcgatttgggcgctcccgggtagtccgcctgaccgtcgatagctggagagactcggccggcgccttgtgggagccaaataccctggtgccggtccacctgccgaaattaaagttctcggctgagagcatgctgatcagtgaggtgactttcctgaagaacagtttctccggaacgaccgcagaaatcacgctcatggcgcctgaagcattcctgccacaacccatcaacctcacgccgctgtatggcgagcttttgcaaggtggtttctgatgacctcagccacgaataaatccgatgattccggaggcgttctacagcgcatgatgcgccggattcagctcgcgacgggctggggtcgggtgacgttcagcgacgacagcaagaccgctcaactgctgcaggtgaagctcaacgattccgagacgcgagacggcacgcctcgtattgctgaatttggcttcacctctcggccgccatcgggttctgatgtcctggtggtgttcctggctggggaccggtcaaagggtgtggtggttgccactgcgcatcaggccagccgccccaccaacctgcaggagggtgaatccatgatttatgacctctggggtaagtcgatctacctgacccaatccggcgggatcatcgtcgacgcgaagggcacgcccgtcactgtcaataatgccacctccgtcacgatcaatgccgccgaggcggtgcagatgaacactcctgttctgcgcgtctctggtgatatcgaagccggcggcaacgtcaaggacaaggtccgcaccatggctgccgaccggttgctgttcaaccagcacaccaatgggaccggcacgacaacgccgagcccccaacaatgagcgatatcactactacctggatatctcaatcggttacaggagattggtcgattactggtggggctctagccagtggagacgacctaagtaccgccgtattgatcagtctttttacagatcggcaagccaatgatgcagatgtaccgcctgatggcggcggagaccgccgaggctggtggggggatgacggtgaggaggttcttatcggatcgagactttggctgcttgatcgtgagcgactcactcctgccgtggctaacaccgccaagatctatatggaggaagcattgcaatggcttattgatgatgaagtggcttcgagcgtggcagtagccacggctatcgccggaggtagccggttgaacagcattgtcaccatcacccaccgcaatggggtggtggttccgctccggttcaactgggtatggggccaaggttgatttcatcgcccaccagcagcccaccttgagtgggtatttttttgcttggagttccccctttatgccgtttattagacccacactttctgaccttcgagcaaatgtcgccgccgatatcacctctggcatcaatactgccgacgggctgttgcggttttccaacttgcaaatcatcggcaaggcagttgctggcttaggccatttgaattatggctatcttgattggattgccaagcaggggacgccatataccgcctcgggcgagtttctggaggcctgggccgccctgaaaaaggtctatcgcaaaacagcgacagacgccgtcggtattgtcacggtattgggaaacaccggcgtcattgtgaacgcaggaactcagttcgcgaggtcagactctgcgactttcacttcactgaataccgcggcggttggccccggtggaaccctggccttgcttgtccgtgccgacacaccgggtgacgcgggaaatacccccgtgggtagcctgatgaagctggagaagtccattgatggcattcaatccagcagtgctgtaacagcagctatcaccggtggggctgatcaagaaaaagatgactcgctgtttcggcgcatgcttgacgcataccaaagcacgccaaacggaggggcaagtgatgattatccaacctgggcgaaagaggtcgctggcgttacccgcgcgtggtgcgccccgaacggttttggtgctggaacggtggtggtttacatcatgctggatgaggcgaacgctagtcacagtggttttccacaaggcaaagacgggatttcctctagcgacaatcgcgtgacctcgggaaacctggccgccggcgatcagctaatagcagccaacagcatcttcgttgagcagccggtgaccgccatggtctacgtctgctcgccgattcccaatccgatcaacttcaccatcagtggcttatccggagcgtcaacaactacgcgtgcggcagtcgcatcctctatcaatgaggtgttcatggcacggggtgcgcctttggctgatggctcgttcgttgagctctccgagataggttctgcaattgcggccatctcggaaacgaaggggtttgtcatcacatctccggttgtcaatctccccaatacgcgtgggtttctgccaacgctgggcaccatcacttatagctgatcatcatgccaaaaccgtcgttcaccagcaccgatttcacatctgcgctgcttgggctgcttccacgcggccgcgtttggccaaaggagctcagcagcattcaggctcaggcagtttcctgttttgccccgaccttctcccggctcagtgactcagcgctgtatctcttggaagacatgtttcctgcgaccaccattaattttctggaggagtgggaggcgaccctgggcttgccagacccctgcgctggtgtgctaccgacattccaggcaaggcgcaaccaggtggtagcacggttctccaatacgggagggcaatcgattcagtacttcaagacctttgctcttggtcttgggtatgccgtgactatcacccagtacgcgccgttccgttgtggacaaagcgtgtgtggccagcagttggggaaccaggactggttttttacctgggccatcaagaccacgctcaacaccgtcaactatttccgtgttggtcaatcagcagttggcgagccactcgccacctggagcaatgccgtgctcgagtgtgagctcacggccgcgaagccaggccattcaattctgcagtttcattattcgtgaggtcataaatgttccagattgacaactcaacagctgtggcgtcgctgccggcagtcactccagagggaaaccgggggtattttacggacggtaatcccgcgacaggtgcaccggcaaccattctccccgccgaattcatgaatatgctgatgcttgagaacttgaacgttctcgacgccggtggaattgccccagctaaggggcactacaaccagcttgcgctcgcgataaaaaatataattcaagatggtgttgggctgagagctcaggcttcattgtatgacggtactccgaacaaactaaccctcactggggcctttggctggggctcaacttattccaatccatcccttctgctgagcgatatgacgggaagccaagctgcattcagcggactgtatcgattccaaaattcaacaattggcaagcctccctttggcggcggctacggaagtttgctgcatgcatccgttgtaagtgacgggagcaataatttcgccactcaactgactattgattacacctcagacaacatcggtttccggaggcttgctggtagcgctgggtggcagccgttccgtcagatttggcatgacggaaacttgggagctgcgaccgagtcggtggcaggcattgcgggcatagccacccaaactaccgttaatgctggcactgatgacgcttcattcgtcacttcaaagaagttggcggcgtggttcaccgcaaagttcggtcaagcaacaacggcggttgcaggcctgatcaagatcgcgaccgatgctttgattgccgccggtaatgataactccactgctgtgacacctctcgggctcaagaacaagtctcagatctcggcctacgacactacggcttccaagttgctctccacggcctctttcgggttgggtagcacctacagcgccggacctttgtatgtgaccgatgccagcggttcacaagtcaccggaacgggccagtaccgttacgacggctcaacggctgggcgcccaaccttcggttctggatttggtggcttgtcgcacgcagcgctttttaacgatgcgaatggcaactacggaacgcaactcggcattgactatgcatctgacgcgattgggtttcggcgccttgccggttcggctggctggcgcccttgggttgaaatcttccatcgtggcaacctggttcaggcaactaccagcgttcccgggctcgctcaactggctgcggcttccgacgtactggctggcacatctacatctctggttccgtcagtcgccgcacttgtcgctggcttgcttggcgccggcggcaggggcgctacggattacctagtgatcccgtatgtcgacaaaatcactggcgcgagacgcaataaaatcctgcagtggaccatcacgcctgcactcaccaatggctcttcatatacctggacctacccagcaacctacaccagtggcatccaattcatgggcgggatgatgattggtagcacttccggggtacttcaaaccaactcgtacggtctagctaacgcccagctttcaaatggtactgctggcagcaacaccaacacggctttcgtattcgtgatcggggaataacatgatctttttcagtagcaagacgactgggttttatccttcggagttgcgagatagctacgaatctcaggatgcgtggccggatgatgcggtggagatgactgataaggaacaggccttgtactggtgcgtgtcgccaccggcggggaaggttctcggctcgctgaaaggtcgaccggcctttgtgaacgtgccggaactgagcccagaagaggctgcagttattgagcgggcgtggcgcgatggtgagctgaagggctctgacgacatcgttgcaaggcatcgcgaccaggttgaagccggcggggccaccacgctgaccgccgatcagtacaaagaactgcaggcttatcggctcgcactacgcgactggccggaatcgtccgacttcccaaaaacatcgaagcgcccaaaagctccggcatggctggcggaacagacaagcaaataactggagtggactgaaatgccgatcaccgagcagcagttgctgcagattctccccaacgccggccgccaagccggcgttttcgtttctgcgttaaacacagccatgaaccgctatgccattgtcggtccgttacgggtgtcggcattcatcgcccaggtcggccatgagtcgggtcaattgcggtgggtgcgtgagatctggggaccaacggcggcgcaggccggttacgaagggcgtgccgatctcggtaacaccgtgccgggtgatggctccaagtaccgcgggcggggcctgatccaaatcaccggccgggccaattacgcggagtgcggtgaggcgctgggcctggacctgatcagcaagcctgacttgcttgagctgccgcagcacgcagcgatgtcggctgcctggttctggtccacccgtggcctgaacactttggcggatcagaaggacttcactaagatcacacggcgcatcaatggcggactcaatggccaggatgaccgccaggggctgtatgacaaggcgctgaaggtgctggcatgacttcaatttatgcaagggtcggcggctttctgctgaccgctgtactgattttcgcttcgctatatggtgcgtaccaccatggcgagacggttacggatgctgaatggcaggcgaagtggaatgcccgggatgcccgcgacgaagccgcccaggcattgaacgaggttgccgagcgcgccaaagaacaatcccgccaacaggcaatcaacaaggtggtccagaatggtcaagctcttatcgactcggccacggccgctgttacttctgctaatcgtgagtctgaccggttgcgcgacgccgccgacaccgttgcccatcgcgtcgcaaccagtcaagtcagcagcaattcctgcactgccgccgcaagccaggcagctacccgcgccgtcctggtgcttgccgacatgcttaagcgagctgaccagcgagcgggtgacctggcagcaactgctgaccaagcccgagcccggggagtaacctgtgagcaagcctatgattcacttggaaagtgatcgagtggatggctttaaacaatagcaaagtgaaaggagatcgggtgccccctttcactttatgaaggtataaccggatggaagattcaggttatgaagtaacatgattatagattcacgtaaaacgcgttctgaatttagctagtgggagtaagctggagccatcttcatcactttggcaagatatgatttttagtaagccatttccacatacaacaatcggatggccttcctctacaaatataacttttcctgcggtacgattctcgattttaacgtcgattaactctaccgctgcaaggatgcgtgcaggaacgccattaacctcgcaggaagcacccttaaaaggacttccgaccgcatcaatagttcggcgtattttcgaagccgattgattccagtctattctgtaatcgtcgtcatcgcgccacaagctataagttgcatctttttcatcttgagcttgagatttgaattgctctccgttcaccagtgttttcaaaactgctaggccagaatgtatatagcagtcactgaccacacgaatagcttcggatatagtgatcggatatcggataggtgtagatgattggtgaattatgtctccacgatcataatcactggcgccgaagagtgcggtcacaccgactgttttttctccattaatcaatgcgtttaccaaaggcgcaaaacctcggtattttggcagtagtgagtcgtggaaaactatcagtttctcgggcggatggttgattatccagcgccaggaaatggccattgcgtattcgctgttgattgtcgaaaaatcgcttcgaagctgaaactttatgttggcctcgtcgcaaaatgaaacaatttcagaagaatagtcatttagtactgctgtgtcttggccaatgacaacttcctcgataatgtctttgaatagtgaggcggcctgctcaataaatttaagccctttttctgtcataacaaataatgttatttttctcatgctgatttcttccttgaagtctatttggttttcttgtctataccggcaatcaagagagccgcgtgcgcttcagctaatagttgagatgagtattccggatcggtttcaataagctgctttatccagcttcgaagttcatatttctgaaattcaaatttgagcaagtaatccccttccaatttgagagcgtcgacctttcccattgctgaattcgggctgtcccattcgacggggccgctttgaacgttgagtgagtcaccgtatgtggtgactgcctgcactgtagacgttctcccgggagcagaggactcccagcgcttgaaggttattttcatatggctgtccgtagttggccgtgattcctagtggtgcaaggatgccatttttttgatgattgtaatatttatgatgcattcagctacggtctatacacaatttgtgccttgtgtcgcggagtggtgaattgcttctgcgcgttgggggtgtcgcttcaaaacagggattgtgtacgttcggcaggacgccggggatgggtggagctcgtaccgcttttcgtaccaatcaatgttcccttgagggactctacggggcctcagaaggcgctgaaaccccttgtctagcgcctttgaaatactccagctaatccgcacataaattccttaccggtttttccgttggggaggggtcaatactcaatacgccttgaggggcgcgtacccagaaactgacccagtgctatccgtggagttttagaccgataagttataaggcaaatagccgcaacaccccacgtccattcgtttgcatgccgtcaaggcttggcaatcgccgcagtcgcaatgctcaaagggaggttgttttgcctcgaaccaatgcgcgcaaggcaaaccgattcgggtggcaagcgtccgccacattcgccggcactggcagcggctcgtcactcagccaagcggcgatcagttcaccgcacagaggtgcggtgatcagcccgcgtgagccgtggccgctattgatgtagaggcccggcagccatgggcagggcgtgtccggtacctggcgtgcgtctttacccagcacggcataggcgcgttggaacgctgcgtgttcggccagcggcccgacgatcggcaggtaatccgggcttgtgcagcggaacgccgcgcgcccctcaaacgattcgggcgcaagctgatcggcaccgaggcgttgcagcaaatcttcggagatttcacgcagcatctgcaggttgccagcgtgttcggcggccgtgggcgtgaggtcttcgttggtgaagtcaaaacttgcgcccagggtatgttcgtcaagccgggccggtgccacataaccctcggcgcagaccacagtggccagtaccgcgctcgcagtcgtctgtgccagccgggtgatttgcccacgaatacgtttgaggggtaagtcggcgctgagcgggaaccgcttgatctcggcggcgccggccagcacgaccacggcggcgctcgccagcacgcggtcgccctcgcgggcttgccattggtcatcgacccgctgcagttccagcgcttcatgatgggtgaggacttcaatcagcggatgcgccgcctgccactggcacagcgcaggcggatgtacccagccgccttcggggaaaaacaggccgccctgggccagctcaatgcccgcgcgttgttgagcttgattgcggtccagcaggtgcagcagatccggcgcgaaagcctcggccaactgggcctggcgttgggcctccttggcgtcgaacgccaattgcagcacaccacaaccgtcccaatcgacaccgcgatgcaggtgctccagcaagcgccgggtatggccgaaaccgctcagaatcaactgcgacaacgccgtgccatgggccgaaagcttcaggtacagcacgccttgtggattacctgaggcctcctgagccagtgcggcgtggcgttccagcaggctgacgcgccagccacgggcagccaggctggcggcggtggcgcagccggccaggccgccgccgataaccatggcgtgacgctcgcccgcaatcgcgggtggccgcgcgaaccacggcttggctgccggtggcgcgggtgtttccgagggccagccgaggaattcgccgcgcaggatctcccacttgtggccgatgcccggcgtgcgcttcatcttgaagcccgctgcgttgatcaatcgacgcacccagccggtgctggtgaaggtgctgatggtcgagccgggagccgccaggcgcgccagttcggcaaacagttcagcggtccacatgtcggggtttttcgccggggcgaaaccgtcgagaaaccacgcgtcgatctgcgcgtccagttgcggcaattgctccagggcatcgccaatcaacagggtcagggtcacgcggccgttgtccagcaccaggcgctggaagccctggtggatggcgatgtactgcgccaacaattgctctgcaaacggtgcaagctcaggccagagggcgagggcgcgttgcaggtcggtgtggctcaacgggtatttttccacgctgacaaaatgcaggcgcgcacccgccactgcgtgctgttcgaacaattgccaggcgcacaggaaattcaagccggtgccgaaaccggtctcgccaatcaccagtcgcccgttcgctggcaaggcagcaaagcgctcctgcaaacggttctgttcaaggaacacatagcgggtttcatcaaggcccgacttatcggaaaagtacacgtcgtcgaacacccgcgagtgcgggcggccttggtcatcccagtcgagctgggcgtgggcgatggggttcatgggcggctcggtaaagacaaggccgccattctagccgatcaaccggcaatgatttgacccacggcaagcgcgggtggaatttcctcccgcgtgttgccgtccaatccgctagtcttgagccatcttgaaacggagctgcccatgttcgaatccgccgaaatcggtcacgccatcgacaaagacacctacgacgccgaagtgccggccctgcgcgaggccctgctggaagtgcagtacgagctgcaacagcagaagcgctttccggtgatcatcttgatcaacggcatcgagggcgcgggcaagggcgagaccgtcaagctgctcaatgaatggatggacccgcgcctgatcgaggtgcgcacgttcgaccagcaaaccgatgaagaactggcacgcccgccggcgtggcgctactggcgccaactgcccgccaaggggcgcatgggcatcttttttggcaactggtacagccagatgctgcaaagccgggtgcacgggcagatcaaggatgcacgcctggaccaggccatcgccggtgccgagcgcctggagaaaatgctctgcgatgaaggcgcgctgatcttcaagttctggttccacctgtccaaaaagcagatgaaggcgcggctcaaggccctggccgacgacccgctgcacagctggcgcatcagcccgctggactggcagcagtccgagacttacgacaagtttgtgcatttcggtgaacgcattctgcgccgcaccagccgcgactatgcaccctggcatgtgatcgaaggcgtcgatgcgcattaccgcagcctgaccgtgggcaagatcctcctcgaaagcctgcaaaacgcgctgaaagtacccaagggcaaggccagtggcatgaacccggcgccgttgattgcatcggtggacaagaagagcctgctagacagcctcgacctgaatcagcgcctggaaaaggacgattacgaagagcaactgatcaccgagcaggcgcgtttttcgggtttgatgcgcgacaaacgcatgcgcaagcacgcgctggtcaccgtgtttgaaggcaatgacgcggcgggcaagggcggggcgatccggcgggtggcggcggcactggacccgcgccaataccacatcgtgccgattgccgcgccgagtgaagacgagcgtgcccagccgtacctgtggcggttctggcagaaaatcccggcgcgcggcatgttcaccgtgttcgaccgctcctggtacggtcgcgtgctggtggagcgcatcgaaggcttctgcacgccggcggactggatgcgcgcctatggcgagatcaatgacttcgaagagcaattgcgcgacgcgggcgtgatcgtggtcaagttctggctggccatcgacaaggacacgcaactggagcgtttccaggcccgtgaagacatcccgttcaaacgcttcaaaatcactgaagacgactggcgcaaccgcgacaagtgggacgactaccgcgccgccgtgggcgatatggtcgaccgcaccagcaccgaaatcgcgccctggacattggtggaagccaatgacaaacgctgggcgcgggtcaaggtgctgcgcacgatcaaccgggcgctggaagaggcgttcgacaagaccgacaagcacgacaagaagaaaaagaaatagaagaggcagccacaggaggcagtgcggtcatgcttttgtataggcggggtgaatgatcgtcgcggttgggaatgcctggatctatgctcgatccatctcccaacaaccacaagatcgaggtagcccatgcgtgaagtagtgatcgtcgacagcgtgcgaaccggcctggccaaatcctttcgcggcaagttcaaccagacccgccccgatgacatggccgcccattgcgtcaatgcgctgctgacgcgcaatggcatcgacccggccacggtggaagactgcattgttggcgccggttccaacgaaggcgcccagggttacaacatcggccgaaacgtggccgtgctctcgcagctgggcactggcgtggcgggcatgaccctgaaccgcttttgctcctcgggcttgcaggcgatcgccattgcggccaaccagattgcctcgggttgcagcgacatcattgtggcgggcggcgtggagtccatcagcctgaccatgaaaagcgtcaacaccgacaacctgatcaacccgctgctcaaggagcaggtgccgggcatctatttccccatgggccaaaccgccgagatcgtcgcgcgccgctacaacgtcagccgcgaagcgcaggacctgtacgccctgcaaagccagcagcgtacagctcaagcccaggccgacggcttgttcgacgatgagatcgtgccgatggcggtcaagtataaagtcgaagacaagaacaccggcgcggtgcaggtgctcgacggcgtggtggatcgcgacgactgcaaccgccccgacaccacgctggccagcctgcaaggcttgaaaccggtgtttgccgaagacggctcggtgacggcgggcaactcgtcgcaactgtccgacggtgcttcgatgaccctggtgatgagcctggaaaaggccctggaattggggctcaagcccaaggcgtttttccgcggcttcaccgtggccggttgcgaaccggacgaaatgggcatcggcccggtgttctcggtgcccaaattgctcaaggccaagggcttgcaggtgtcggatatcgacctgtgggagctcaatgaggcgttcgcgtcgcagtgcctgtatgcgcgcaatcgcctggaaattgataatgcgaaatacaacgtcaacggcggctcgatttccatcgggcacccgttcggcatgaccggttcgcggcaggtagggcacctggtgcgtgagttgcagcggcgcaatctgcgctatggcatcgtcaccatgtgcgtgggtggcggcatgggggctaccggcctgttcgaagccgtgcgctaaatcttactgaagaaaccggatcaaaaatgtgggagctggcttgcctgcgatggcggtgtatcagtcaaccattctttggctgccactgcgctatcgcaggcaagccagctcccacatttaaattgtgtcgtagcccaactcttctgcttacctctagaatgccccaccacttcctcaggcattcggggcgctcatgcacatctcttccggtcgctgggtttacggctttggcttgaccctgttgaccgcgtttctctggggcatcctgccgatcaaactcaaacaggtcctgcaagtgatggacccaatcaccgtcacctggtttcgcctggtcgttgccggcagttgcttgtttatctacctggcgttgactcggcgtttgccgagccgcaaggtcttgggccccaagggcggctggctggtggggatggcggtgtgcggcctggtgggcaactacgtgctgtatctggtcggccttaaaatgctcagccccggcacggcgcagttggtggtgcagatggggccgatctttttgatggtcgccagcgtatttgtgttcaaggagcgtttcagcctggggcagggggtgggcctggtggtgctgattgtcggcttcgggttgttcttcaaccagaggctggtggaaatgctgacgtctctcggcacctatacggcgggcgtgctgacaattttgctcgccaccaccatttgggtgttctacgccctgggtcaaaagcaattgctgacggtatggaattcgctgcaagtgatgatggtgatctacctgtcatgtgccgtgctgctcacgccgtgggcccatccgttggaagcattggacttgagcccgctgcagggctggttgctgttggcctgctgcatgaacacgctggtggcctacggcgcctttgccgaagccttggcgcattgggaggcttcacgggtcagcgccaccctggctcttacgcccttggtgacctttgtagcggtggcgttggcggcgtggttgtggcccgattttgtccaggccgaagagatcaacgccctgggctatgccggggcgttggtggtgatgctgggctcggcgaccgtggcgctcgcgccgtcgctgatagccgggctcaaggcccggcggttgcgtctggcgtcttagtgcccggcttcaagcatgttttccgggcgcacccactggtcaaactcggcatccgtgagaaagcccaggtccagcgcggcctggcgcagggtcaggccttcggcgtaggccttcttggcgatctgcgctgacttgtcgtagccgatatgcgggttgagcgccgtcaccagcatcagcccgcgctccaggtgttcggccatctgctcggcgtcaggctcaaggcccgccacgcagtgttcctggaagttgttgcagccgtcggccagcaggcggatcgattccagcaggttgtggatgatcaccggtttgtacacgttcaactgcaagtgcccttggctggcggcaatgccgatggtcacgtcattgcccagcacctggcaggccagcatcgacagcgcttcgcactgggtcgggttgaccttgcccggcatgatcgaactgcccggctcgttggccggcagcttgacctcggcaagccccgcacgcgggccggagcccaacaggcgcaagtcgttggcgagtttcatcagcgccacggccagtgttttcagggccccgtgcagggtcaccagcggctcgtggccggagagggcggcaaacttgttcggcgcggtcacgaacggtaagccagacaaggcggccagctcggaggcaatcgcctcgccaaagccgtggggcgaattcaggccggtgccgaccgcagtgccgccctgggccagttcgcagacggcgggcagggcgctgcggatggcgcgctcggcgtaatcaagttgggcgataaacgccgagagttcttgcccaaaagtgatcggcgtcgcatccatcatgtgggtacggccggttttcaccagcttcacatgccgcgccgacaactccgccaagccgccggacagattgccgatggccggcaacagctgttggtggatggcctgcaccgcggcgatgctcatggcggtggggaagcaatcgttggaactctgtgatcggttcacatgatcgttggggtgcaccgggctcttgccgccacgggccttgcccgacaattcgttggcgcggccggcgatcacctcgttggcgttcatgttgctttgggtgccgctgccggtctgccacaccaccagcgggaactggtcgtcatgctggcctgcgagcacttcatcggcggcctgttcgatcaggcgggcgatgtcggcgggcaggtcaccgttacggtcgttgacccgtgcggcggccttcttgatcagggccagggcgtgcagcaccgccagcggcatgcgttgctcgccgatggcgaaattcaccagcgaacgttgggtctgcgcgccccagtaagcgtcatccgggacgtggacttctcccaggctgtcggtttcgatacggctcatcgggcacactccttcaggttcgtttgcgcagtttaggctgtgatcgccctgcggggttccataaaagacgtttcatcggctgccggccccgcaaaaccaggcccgacaaggcctggggttgagccgcgaggttttttaggcgcagaatggtcgcccttggggtcttacctcgcctgctagaaaaggaaactcgatgactcgtcttcgtgccatctgtaccgcggttgctctggtttgcgccagcggccaggtttttgccgataccgccagccataacgccagtgccgaagccttccttaccctggcccacgctgacaagctgggtaccccggtgtacatgcaagtgcagcaaatgttcgcccagcgtttcgaacagaccaaggcgcctgccgccaagcagtccgtactggacagctaccaggccaaggccaacgccgctctggaccaggctatcggctggccgaagctgaaaccggacatggtcaagctctacaccaccaacttcagcgaatccgaactcaaggacctggttgccttctaccagtcgccactgggcaagaaagtcctggaaaaaatgccgcagctgacccagcaatcggcgcagatgacccaggccaagctggaaagcgccgtgccggtggtgaacaaactgctggaagacatgaccaacgagctcgcaccggccaaagccgccgctccggccaagaagaagtaagcaggaatgaccatgcaacagcgtatcgaaacggcgctcgccgccctgggcccgcaacacttgagcgtgctggacgaaagccacatgcacagccgtgggttgcagacccacttcaaggccgtgctggtcagccagcagttcgaggggcttaaccgcgtcaagcgccaccagacggtctacgccaccctgggtgacctgatgagcgagtttcatgcgttggcgctgcatacctacacgcctgacgaatgggcgaaaatcgacgcagccccggcctcgccgacctgcgccggcgggcatgactgatgattgggtgtctctgacaccgggcatttgttagaatccgcaacgcgccgcttagccggcgcgttttttttgcatccggttcaccccttacgagggtagccacctggagagaacacccatgactcaaccgattgtcgtggcggcactgtataagttcgtcaccctcgaagattacgtcgccctgcgcgagcccctgctgcaggcgatggtcgacaacggcatcaaaggcactttgctgatcgccgaagaaggcatcaacggcactgtttccggcaaccgcgaaggcattgacggcctgatggcctggctgaagaacgacccgcgcatggacgacatcgaccacaaagagtcgtattgcgacgaccagccgttctaccgcaccaaggtcaagctcaagaaagagatcgtgaccctgggcgttgaaggcgtggacccgaacaaaaaagtcggcacctacgtcgacccgcaagactggaacgcgctgatcagcgaccctgaagtattgttgatcgacacccgcaacgattacgaagtgtcgatcggtacttttgaaggcgcaatcgacccgaagaccaccagttttcgcgaatttcccgactacatcaaagccaatttcgacccggccaagcacaagaaagtcgccatgttctgcaccggcggcattcgctgtgagaaggcgtcgagctacatgctcagcgaaggcttcgatgaggtgtaccacctcaagggtggcattctgaagtacctcgaagaggtgccgcaggaagagaccaaatggcagggcgactgctttgtgttcgataaccgcgtgaccgtgcgccacgacttgagcgaaggcgactacgatcaatgtcatgcctgccgcacaccggtgagcgtcgaagaccgcgcgtccgagcactatgtggccggcatcagttgcccgcattgctgggataagctgccggagaagacccgtcgcagtgcgattgaccggcaaaagcagatcgagctggccaaggcccgcaacatgccgcacccgattggcttcaactacaagcaaaccccttccgaggcctgacccatgcccgcgcgcctgctctatgtgatggacccgatgtgttcctggtgctggggctttgccccggtggccgaggcgttggtggagcaggcccaggcggccggcgtggagttgcatctggtggtgggtggcttgcgcaccggcagcggcgcggcactggagccggcgacgcggcgctacattcttgagcactggcaggcagtcaccgacgccactggccagccgttcaagcgggaaggggcattgccggacggttttgtgtatgacaccgagcccgcctgtcgcgccatcgtcactgcgcgcagcctggcgccggactgcgcctggaaactgctggggctgatccagcgcgcgttttatgtcgagggtcgcgatgtgaccctcgccagcgtactggtggaactggctgagcaggccggtatcccgcgtatcgagtttgccggcgagtttgaccgtgccgagcagcacgctgcgacggctgccgatttcacctgggtgcaggacctgggcattgccggtttccccacgctgttggccgagcgcaaggggcaactggccttgctgaccaatggttaccagccgctgtccgagctgtcgcctttgttgggccgatggctggagcgagcaacctgtgcatgatcagcccgacacgcatgagcagcccaaacgcaccgaccgcctgacctgggcggagattcgccgcctggccctgcgccacaagaagtccttgtggatcgcgaatggcgttgccgtgctggcgacgctttgcagtgtgcccattcctctgttgttgcccttgctggtagacgaagtgctgctcggccacggcgacgccgcgctgaaagtgatgaaccacgcgttgccgctgggctggcagaaggctgccggctacatcggcttgatgctgctggtgaccctggccctgcgttgtggcgcgctggtgttcaacgtggtccaggcgcggctgtttgcacggctggccaaggacatcgtgtaccgcattcgtgtgcgcctgatcgagcggcttaaacgcatttccctcggtgagtacgaaagcctgggcagcggcactgtcaccacgcacctggtcaccgacctggatacgctggacaagttcgtcggcgaaaccctcagccgtttcctggtggccatgctgacactggtggggacgtccgcgattctggtgtggatgcattggcaactggccttgctgatccttttgttcaacccgctggtgatctacgccacggtgcagttgggcaagcgcgtcaaacacctgaagaaactggaaaacgacagcacctcgcgtttcacacaggcgctgaccgagacgctggacgctatccaggaagtgcgcgcaggtaaccgccagggttttttccttgggcgtttgggccagcgagcccaggaagtgcgtgactacgccattcactcgcagtggaaaaccgacgcctccagccgcgccagcggtttgctgtttcagttcggcatcgacatctttcgcgcggcggcgatgctcacggtgctgttttccgacctgtccatcggccagatgctcgccgtgttcagctacctgtggttcatgattggcccggtggaacagcttttgaacctgcaatacgcctattacgcggcgggcggggcggtgacgcgtatcaacgaactgctggcgcgtgccgatgagccgcaatacgctggcggggaagatcctttcaccgggcgtgagacggtaggcattgaggtccgcggcctcaacttcggctatggcgaagagcgggtactcgacgggttgaacctggccatcgcgccgggtgaaaaggtggcgattgtgggtgccagcggcggcggcaaaagtaccctggtgcaattgttgctggggctctatacgccgcaagcgggcagcattcgcttcggtggcgcgacccagcaagccattggcctggaaaccattcgtgaaaacgtcgccgtggtgctgcaacacccggcgctgtttaacgataccgtgcgtgccaacctgaccatgggccgcgaacgcacggaccaggcctgctggcaggcactggaaattgcccaactggaggcgaccgtcaaggcactgccccagggcctggacagtgtagtggggcgttctggcgtgcgcttttccggcgggcagcgccagcgactggccatcgcccggatggtgctggccgagcccaaagtggtgattctggacgaggcgacttccgcactggacgccgccaccgaatacaacctgcaccaggcgctggcgcggtttctcagtggccgtactacactgatcatcgcccaccgcctgtcggcggtgaagcaggctgatcgagtattggtgtttgacggtggtcatatcgctgaggacggcgatcatcagcagctgattgccgatgggggtttgtatgccaagctttacgggcacttgcaacaagtacgttgatttagcctaggctgtgctatcggaagcggtttttcgcgtgcgtatccagcagtgcatgtgcaagggacttcatgaagcaaaagcggactctcggaacgcctcggctgctgggcatcgtctggccctttatcgccgttgtgttgttccaggcattgttgggctgcgtcagtctctacgtgctttcagccgtgcgcggctatgtggccggtgaaagcttgtggtccaagggccagaaggacgctatctattacctgacgctctatgccgataatcgcgaagaaacgacctacctcaaataccagcaggccatcgcggtgccccagggcgggcacgagttgcgcatcgccttggaccaccccacgccagacctggttgctgcacgccacggcattctcaaaggcggcaaccacccggacgacgtctccagcctgatctggctctatctcaattttcgccacttcagctacctggaaaaagccattgagctatggactgtcggcgacggctacctggtgcaactcgatgaactggctcaggagatgcaccgcgcggtcagcagcgatcaggtgagtggcaaccaggtgcgccaatggaaggcgcgcatcatcgcgatcaatgacggtgtgacaccggccgccaaggccttcagcgatgccctgggtgaaggctcgcgcatgattttgcgcttgttgctgattactaacctggccaccgctttgggcctgatcgccttggcgctgctgcgcacccacaagctgttgacccagcgccatgcctttgccaatgcccttcaggcggagaaggagcgggcacagatcaccctagaatctatcggcgacggtgttatcaccactgacgtcgacggtgccattgcctatatgaacccggcggctgaggcgctgactcactggaagtcaagccaggcccagggcctgccgctggccgcgctgttcaaactgctggatgaaaacgccgagcccgacggttttaccctgatcgaacacattatcaagggccaactcagcggtggcagcgaacattccaagctgattcagcgcctggacggcagcacggtgtcggtcaccctggtgggtgcaccgatccgcagtgccggcaaggtcagcggcgcggtgctggttctgcatgatatgacccaggagcgtcagtacatcgccaatctgtcgtggcaggcaacccacgacgccctgaccggcctggccaaccgccgcgaattcgaataccgcctcgagcaggtgctgcaccaggtcgggcgtcaacagaatgggcggcacgccctgatgttccttgatttggaccagttcaaactggtcaatgacacctgtggccatgcggcgggcgatgaactgctgcggcacatttgtgcactgctgcaatcagacttgcgcgagggcgataccctggcacggctgggtggcgacgagttcggcattttgctggaaaactgcccggcgccggtggcggaaaaaattgccgagagcctgcgccacaccgtgcaaagcctgcattttgtgtggaaaggccggcccttcatgaccaccgtgagcattggcctggtacatatatcgcaaaccccgaccacccttgaaacctcgctgcgtgccgccgacatggcgtgctacatggccaaggaaaagggccgtaaccgcgtgcaggtctaccatgccgacgactcggagttgtccctgcgctttggtgaaatggcttgggtacagcgcctgcatatggccctggaagaaaaccggttctgtttgtacgcgcaggaaatttcgcccttgggcacgaccgatgctggtactggccatattgaaatcctgctgcgcctgcacgacgaggcgggcaggatcattctgcccgacagctttattcctgccgccgaacgctacggcctgatgccttcgctggaccggtgggtggttgaaaatgtatttaaaattattgccaactgcctgcgtgaacggccgggccggtctatggccatgtgtgcgataaatctgtcaggtattactattggggacgatgactttctcggttttttacgtgagaaattcgactcttataacattccccccacaatgatctgttttgaaataacagaaaccagtgctatcgcaaatttaggcagtgccattcgttttattaatgaactcaaagcgttaggttgtcatttttcgctggatgacttttgtgccggaatgtcctcattcgcctatctcaaacatttacctgtagacttcctgaagatcgatggaagtttcgtaaaggatatgctggacgacccgattaaccgcgccatggtcgaagtgatcaatcacatcggccatgtcatgggtaaacgcacaattgccgagtttgttgaaacaccgcaaatcgaacaggctttacttgagataggtgtggattacgctcagggctacctgattgaacgcccgcaattgtttacctttgatagcttgcagtgccgacctgtgcggccgcagcctctgttattcaaggcgcccggtactttccgttgaaacatttgccggtctgtacaaccacactaaaaaggagccctacagtgatcgacacattcaacagaaccggcccgcttatggaagcctccagttaccctgcctgggcgcaaaagctcatccaggactgtagcgagagcaagcgccgagttgtcgagcacgaactgtaccagcgcatgcgcgataacacgctcagcgccaagaccctgcgccactacctgatcggtggctggccagtggttgaacagtttgccttgtacatggcacagaacctcaccaaaaccaagtttgcccgccatcctggggaggatatggcgcggcgttggctgatgcgcaatatccgcgtggaactgaaccacgcggactattgggttcattgggcccgcgcccacggcgtgagcctggaagaactgcaagcgcagaacgtcccgcctgagttgcacgcactgagccactggtgctggcacacgagttcggcggattcgttgattgtcgcgattgccgccaccaactatgcgatcgagggggcgactggggagtggtccgccgtggtctgctctaccggcgtgtacgcggccgcctttcccgaggaagaccgcaagcgcgcgatgaagtggttgaagatgcacgcgcagtacgacgatgcccatccgtgggaagccctggaaatcatctgcaccctggccgggatgaacccgaccaaggccttgcaggtggagttgcgccaggccgtgtgcaagagctacgactacatgtatctgtttctggaaagttgcatgcggttggagaaggagaaggaaaagacacccgtcgttgtgcgcgagcgtcagccacgcgtagccagcgaagcgtgatgtaaccgtgatggcgggggttaccccgccattgccaagcggttgcggccttcgcgcttggccacgtacaaggcattgtcggcgcgacgcagcaggctctcggctgactcggcggccaacaaggtcgaacaccccaggctcaccgtcaactctatctgtgtaccctccgcccaatactcatgggcttgtgccgctcggcgcaggcgctcgccgaccatccccgccgcatcccggcccgtgtttgacagcaggatcagaaactcttcgccaccaaaccggaacaccatgtccacattgcgcagctggcttttgatcgcgccagccacagcacgcaacacattgtcgcccgccgcatggccgtgggtgtcgttgattttcttgaagtgatcgatgtccagcatcagcaatgagagcgggtgcagatgccgccgcgccatgtcgatctcccgttgcagggtctggtccatggcgatgcggttgccggtttcggtcaacggatcacgcagtgcactgcgagtggcggcgcgatagagcagggcattacgcatcggatacagcaacgtcgccagcagagactcgagctggctcagttcatcttcgatcagccgctggttgcggcggaatatcagctcgccaagatgctcaccttcatggctcaaggagtagctcaccgagtggtggccgcggtggccaaactccaggcgcaggtcgctggcttcgtgacggtattgcaatgcgtccagcggcaccaggcgttggatctcgcgaaagaacatgccgagaatgcgctccggctccaggctggtctgtaattgttggctcagttgctggcgaagttgcgtgaacgtaacggggcggcgagggcgcagtgctggttgaccaaaccccaggcgttgcaatttggcactgtcgaagtcaattgcgttggtctgggtcggtgttttcataagcgggcggcctctaagcacttaactgtcttacaggctcgatgagagtggcgggtgccaagcgtcttactgttccttcagttctgtaaaacattggatacagtctaaaccgctttggtccgggtttataacccctgggcactgccacacgtcctgtcatcgcttaacctgtttgtaaaaagttagagcgagattcatgccactttggataacttaataaaagtccttataaatcaatcggctgatttggaagttaacttcagccgatggttaatgacgccagttatttggcaagttgcgcgtcagctttgtaccagcgtgttgcggtcgatctgctcaattgaggtgacacccgtcaaggtcatggcgacgcgcatttccttggcaaagatgtccagcaagttttccacgccgcgttggccatcggctgccagtgcataggctgttgcgcggcccagcaggcaggccttcgcccccagggcaagcatgcgcaccacatcgaggcctgagcgaattcctgaatccaccaataccgtcaggtcatcgccgaccttttcggcaatggccggcagggctttggcagtggacaacaccccatccagttgccggccgccgtggttggagaccacgatgccgtcggcaccgaaactcactgcgtccttggcgtcctgcgggtcaaggatacccttgatgatcatcgggcctttccagaactcacggatccactccaggtctttccaactgatggacgggtcgaagttgttggccagccagccgacgtaatcttcaagggtggtggctttgccaaggtacttggagatattgcccaggtcatgcgggcgacccatcagcccgacatcgaaagcccactgtggcttggtgacggcttgcaacatacgccgcgacgcggcgaacggtccggacatgcctgagtgtgcatcccggtagcgtgcgcccggtgttggcatatcgacggtgaacaccagcgtggtcaccccggccgcctgcgcgcgctccagcgcattgcgcatgaagccgcgatccttgagtacatacagctggaaccaaatggattgcgggctctgcgacgccacttcttcaatcgaacacaccgacaccgtcgacaggcagaagggaatgccctggctggcggccgccttggcggcctgcacctcaccgcgccgcgcatacataccggtcaggcccaccgggctgaggatcaccggcatcgcctgttcctggccgaacagcgtggtcttcaagctcaggttgtcgacattgcgcaggatgcgctggcgcaggctgatctcggccaggtccgagctgttcgcgcgcatcgtgtgttcggcgtaggcgccgccgtcgatgtagtcgaacaggaagcgcggcagtttacgcttggcggcttcacggtaatcggacgcggacgagatgatcatgagcggtgtctccacaggggcaaggtgggttcacgataagcaaacatctgtcatgataaaaacaactttaatcactgccattaagtcgaaaagggaataccgatgaacctgagagcgttgcgtgcgtttgtcgaggtggtacgccagggtggtttttcccaggcggccgaggtggtgtccctgacgcaatccacggtgagcaaggcggtcaagacgcttgaagaggaattgggtatgccgctgctcaatcgccttggtcacaagaatgagcttaccgctgccggcaaaattgcctaccgccgcgcctctgtgctgcttgccgaaagcaatgacttgatcgccgagatcaatgacctgcgcggcctcaagcgtggccagttgcgtatcggcctgccgccggtgggctgtggcgtgctgtttgcggcgatgtttgcggcttatcgcagccgataccccgacatcgaaatcgagctcaccgaatatggcagtaaaaaactgcgtgaatgcctggacgcgggggaggtggatctggcggcgttgctgctgccggtggacgagggctttgactaccaacccgtgcgcaatgaaccgctgatggctgtgctgccgctgaaccacccattggcccgtcgcaagcgtattgatttttccgaccttgccgacgccccgttcattttatttgaagccggttttgccttgaacgcgaagatccttgccgcgtgcgagctaaaaggcgtcacgccgaaggtgaccgcccgcagcgggcagatcgactttatcgtcgatctggtggcggcggggctgggcgtcgcgttcctgccgcgcatgcttgcgcacaagcatcaacacgcaggcatcgcactgattccattggatgaaccccataccgactggcacattgcgttggcctggcgcgccagcgctcacctgccgccagcggcacgcgcctggctggatttggccacggaaatggccagcccggcctagcctggcaagcggtgattcggccggatacctgcaagtgcttgacttcttctttttaatcagtaacatacggcgcattccgcgatagctcagttggtagagcaaatgactgttaatcattgggtccctggttcgagtccaggtcgtggagccagatagagaaaagcctgcagcgatgcaggctttttttttgccctgaatttaaggatcccgtccaagcacataaagtgatttgcacgcaatattggtcagcgaatatagcgaagctgctggtttctattgaccaagtgccctccgtatttgagtgggcatattcgcgatcgaaaggggtgttcaagctttattttgaatagatagcccagtgatagcattttgatctatgaaaaaggcaagaccctttaaatacctggtctacgctcgcttcatcggtcctgatatttacagcgacccaatcactattcgtatggacacgatgatggctggaatggacgacatggcttacacagagccagccggagcgcttgactccggtctcgtctgccttgcaatgctcgctcgctttcacaatattgcggcatctccagagcaactgaaccacgaatttacgccccaagggcaactctttggcaaggctgaaattctactggcctctcgtcatcttgggcttaaggccaaatcgatcaagaccacgcagcagcggctgtcaagtacgccgctcccggccattgcctgcgcctctgacgggggcttttttatcattgctcgtgttgatcaggggaagattttaatccacagcccgcaatgctcacgggctgaagtcattgacgaacaacagcttgccgcgagatggcagggtgagatgattcttctgcgttcccaggcgacgcaagccgctgagttgagcaaattcgacttcacttggttcattcctgcggttgtcaaatatcgaaagctgcttggggaagtattactggtttcttttgtactgcagatattttcgttgctcacgccccttttctttcaagtagtaatggacaaggtactggtacatcacgggctgacaaccttggatgtcgtcgccattggtttgcttggcatcatgctttttgaaaccgtattgagcgggctgcgagcctatgtcttcgcacacacggccagccgaatcgatgttgagcttggatcaaagctattccgtcatctggtcaccttaccgctggcctattttcaagctcgtcgtgttggggactcagtggcgcgggtgagggagctggaaaacattcgcagtttcctgacggggaatgcgatcaccctggttctcgatattttgttttccatcgtttttatcgcggtcatgtttttttacagcggatggctgacgttggtcgttgtgctttccctgcctttatatattttggtttcagtgataatcactccgctgttgcgcgtgagactgaatgaaagtttcgcgcgcggcgctgaaaaccaagcctttttggtagaaaccatcaatggtatcgatacgctcaaatccatgtcggttgagccacagatcacccgcaaatgggacaaccaactcgctgcctatgtgtcagcaggtttcaagactcaaaacctttcgaacatcgcgaatgaaagcgtttccctgattggaaagctcgtgactgtcgccacactgtggttgggtgcccgtttggtcattgatggtcagctatccgtcggccaattgattgcattcaatatgcttgctggccgagtctcacagccgatcatcagacttgcgcagctctggaccaatttccagcagacgggcgtttcagtgcagcgcttgggcgacatcctcaacagtcgcaccgagggcaatcaaaccgcgcgcagtgtcctgcccgcgttgcgaggtcaaatcgaattcgaccaagtgcaatttcgctataggcctgacggttcagaagtccttcgtggtgtcagtttgaatgttcaaccgggtgaggtcctaggcatcgtcgggcggtccggttcggggaaaagcacgctgacacgtttgctgcagcggctgtatgtacctgagcgaggacgcgtactcgttgatggtatggatctagctctggctgatgtgacgtcgctgcgacgtcagatcggtgtggtgctgcaagacaacatgctgttttgtcgtagtatccgcgaaaacattgcattgaccgacccgggaacgccattggagacagtcatacaggctgcaaaaatggcgggtgctcatgacttcattctcgaactgccggaagggtatgacaccgttgtaggagagcacggtgcgtcgctctcaggcgggcaacggcagcgaattgcaatcgccagagcgttgatcgggaacccgcgcattctcatttttgatgaggcaaccagcgcattggattatgagtccgagcgggttattcagcaaaacatgcagaccatttgcaagggccggacggtaatcattattgcccatcgcttgtccgccgttcgtgatgctaatcgcatcgtggtcatggaccgaggccagattgtcgagcaaggcacccatggcgaactgctggagcttcaagctggccattactcacgcttgcatcgtatgcagcaaggatgaccgagcatgagcgagccatcagccacacaggagttttttagacgataccgccgtgcatggggcaatgcctgggagcaaaggaggcagtcagaagctgtgcgtcgcttgccacatgaggtgcagtttttgcctgccgccctggcgctgcaagaacagcctgttcatcccgctcctcgctacattcttttcggcatcatgttgttcgcggctttggcattgatatgggcctgtttgggggagatcgacgtcgttgcaacggctactggcaaagtagtcgccagtggaaaaagcaaggttattcagcctagcgaagtggcggtagttaaagctattcacgtgtatgacggccaaaaggtaaaggctggagatttgttgattgagcttgatgccagttccaccacagctgacgtccagcgtttgagcagcgacttgatggcggcagaggtcgacagtgctcgcgcgggcgcgatgctggaagcgatccaacatcaaaaggcgccaggctctctccaggaaaagatccctggtgcggacccgactcaaacacatggtgccgagcagtggctacagggacagtacctggaattcaagagtctgctctttcaggctgatgctgagatagaccagcgttcagccgaaattgcctcaaccgctacaagcataggtgctttgcagaagacgttacccataagccgtcggctcgctgcggattacaaagccttactggagcagcaatatgtccctcgtcatgcctatcttgagaaagagcaagcattgctcgatctggaacgggaactggcgatgcaacgggcacgagttgcagagctcaaggcggccagaaaagaagctgaagggcagcgcgaaggcgtccttgcccagacaagacgcgccatgctggatctgcaacagcaagcggagcaaaaggtggcctccctcactcaggacgtcaaaaaagcccggcagcgtaaccacctgatgtatttaatcgcgcctgtgaacgggacggtgcagcaactggccgttcataccgtgggcggagtagtgacggctgcacaggcagtgatggtgattgtgccagcagatcaacctgtcgaggtggaagctatgttggagaacaaagacattggatttgttaaagcgggccaaatcgttaccgtcaaagtggatacttttacgttcacaaagtacggcgtcgttgaaggggaagtcgtcagtgtatccaatgatgctattgaagatgagaaacgggggcttctctacagcatgagagttcgcctgttgagtgattatgtaaccgtaaaggggcaaggcatacccctcgtaccaggaatgtcggtgtcagctgaagtaaaaacagataagcgaaagattattgattttatattaagtccattggagcgaaatctttcagaagggctgagggagcgttgatatggacaaaatggcgagtgaccaacgtcttaaaagagcagatttttataagcgctgtgcaatctcgttgctggtcacttatggggtggtcgtcacgtgcgttttttacgcccagtggattaataagattcctgaaacgcttaagcgagttgatggcgttctcgggtttgttgaaatagggaggcagcgattgacgacaataaccagtgaggcgcagccctacgtgtttacctgcgctaatggtgttggtgggacttccgcgtgcctcgaccgaaaaaccatggctgacgtcgatggaaaggccgcctctgccctgtggtacgagcagtcctatttgccgtttaatgtaaagcgcaagttagttgttctaacggttgatggaaatgaggtgctaagcagggatgtctctgaatacagaaatgcgcgaagtaaaaagatagatggttggttgtttgcgttgatgggtgcggttgtaataattctttcagcgggttgcctgaagaaggcacggagaaaataaaatggctcaaaatacagcagatacagtggccagtgttttggcctatttgagtacgccagtgggagccgcacctgccatcatcgatgcttcaaagggcgagtctgcagatgcagcgttgggggcgttgcaaacactcgccggccttgttgaggtgtttggtaaaacggttccatcagctgtcggtggtgtattaagtgcgaccgtattagccagtgacattagatcgctctatgagtcttataacgataataatgggcgcgtggagaaaaaggatgtctactccctgctctcggatatcacgggtatcgtggctgctgtagcattggcaggcaccgctgccggtgccgcagtcccgttgttgattaccacggcggttgtagccactgcggcgggtgcggccctgacagtaatggcaatggcttccgacggagattttgattggaaaccagcagtcgaaggactaaaaaatgctctgaattcggtggcggatgtcctcggggatgcctacacgaccgctgttgatgcattgggcgatgccattacggaaactgccgatttcggcgaggcgctgttcgattatgttagtgattcgctgtctgagattgcccaatctatatctgatttcagtattgtcgatatcgctaattcaattattgaggcattaaagcaggcttttggcgtagccgaaaatacgcgcagccctctgattcttgatttggatggagatggagtagaaaccatttcatctaaaaatggtgtgttcttcgatcatgatggaaacggtttcgcagaaaagtcaggctgggtgggtaaagatgatggtttactggtatgggaccgtaatggtaacggtcaaattgacaatggtagcgaactgttcggaaaccagactcacgccggcggtgctgccggagttcaggcggcgaatggttttttggcattaaaagctttagatcagaataacgatggaacggtagattcgagcgacagtgcgtttgcaagccttagggtttgggtcgaccgtaatagcgatgggaagttgcaggctaacgaattacttacgctgaatgaagcaggggttcgatcactgaatgttgcctatgcggaaccaggaaaagttgatgcaaatggtgcggtgaataagtcagtaatagatgctagcggaaatcagcaccgacagacgggaagctttactcgggctgatggaactgaagcgtctatgaatgacgtttggttcgacgtcgacacatccaaaacgatcgatctgaacgtagtgacagtcactgctcaaatagaagcgttgcctgatgtcgctggttttgggaatgtccactcccttcatcaagcgatggcgagggacgccagtggaaagttggccgctttggtaggccaatttggcgtgcagatggatgattctgctcgtcgagtactgctgacgcagattatttattattggacaggggtccaggaggttgatcccggcagtcgtgccgccacgctgatctatggaaacgtgattggcgacgcaagaaaactagcggcgctggaaacatttttaggtcaggagtacatggggacttggtgttggggacagagagatccaaacccccacgggcccgcagcggcgttgttgcttcaagcttttgataacttgtcagacgcggtctataacaagttgatgttgcaaacgcactttgcggggttgattgacagcgtcgatattcaaatgtcctcgcaaggtgtcagttggaatatagacaatctgattgcctcattgcagcaaaaatacacggccaatagcctggcgggagaattgctattggcagagttttcttcaagcctcaagtccagcggtcatttcgggcaggagatactggagaaactacgggcgaggggggacgcacaagctgacggcttctattttttactcgccggtgtggggcttccggtatatatcggcagtggcggtaatgattttatatacggcaacgcggagggcaatctcctggtagggaaggcgggggatgacaatatatatggtggtgagggcgctgataaaatttatgggggaacagggaatgactttctcgtcggaggaaacggtgccgacacctatgtattcaatagaggagacggagtcgacaccattctcaatgcggacactgatagtgccggcgctgcattggatgtgatcagttttggtgagggcatatccgctgatgacgtgatcctgtcagcggcctactatgatctggttattagtattcgtgggacacatgacagagttatcattcaaagtttctttgatgatgagtcgctcaataatcacgggtacgcgattgatgaagtaaggttttttaacggcgtcgtgtggacgcgtgcacagttgatggcttttttttatactggcacacagggtgatgatgtgcttttcggtaccgccgctgctgatgttttatccggcttggcaggtgacgaccgtttgtttggtgaaaacggtgacgattatctaagtggcggggatggggctgacatcatctggggcggtaggggcaatgacatattggcgggcggtaagggggctgatgagttaacgggtggtagaggtagcgatacttatttatttacactgggagatggtcgggatgttatttcggaaacagaaaaatacgccgatgaaattgatgtaattcagttctctgaagggatatcgagggcggatatttcacttcgaatagaaggctcagatctgctcctactacattcaaatggcgtggacagcattacaatcaaggcgtggcttaaagatgcatggtctccgtataaaatagaacgagtgctgtttagtgatggcagtgcatgggatatcccggcactgcttaaactcacgacggagcatgacggtacggactcagacgatacgcttatcttcgataagccttttgctgatcagacctttgaaggtcgggcaggcgcagatcatataatttcaggcgcggggaatgatcggctaagtggcggcgacggcgatgacgtgttggaagcaggttttggtgctgacatcttgattgggggcaagggtgacgatgtgctttacggtggtagaggcagagacatctttttgtttgagttgggtgatggtcatgatgttgtttatgattttaacgttgatgacgaagccaacgtcatcaggtttggcaccggtattcttcccagtgagatcagtgtgacgcgccgtggggatgatttacttctcacccatctcaacggcttggacagtgtagcgttagtcgattggttttcaccgtatcgatatactcaggcgttttccggaattgaattcagtgatggaactgtgtggtcgcctcaatcaatcaatgattcgtttctacagcaatttgggggggacggcgatgatgttattgtcggcgtcacgggccgcttgtctcaatacctgtcaggcggcggtggccatgataggttaattgggggtggcggtgatgatgtattggtgggtggaaccggtaatgatgcgcttgaaggtggatatggaagtgacacttatctgttcagtgcaggcgacggcgccgatacaatagtcgagcaagatgcttatacggtcgacacgttaaagtttgttggcgggattttgcccgagcatatttcgatgcgccgcgcaggcactgatcttgtttttatacatgggaatggcaccgactctatcgttgtaaagaaatggtttgagtacaacaatggtttggcgctcgacatcgtatcgtttgataacggtgttcagtggacggggagcgacatctctcgtattttcacgcacttggaaggtaccgtcgggaatgatgttctggatttgagttcgctcgttctcgatcaatcattgtcaggtcttgaaggtgatgatgtgctcaccactggtcgcggagacgatgtgttggccggtggcacaggtaacgatgtgcttattggtggggcgggttcggacgtctatattttcaacttgggtgacggtaaggatgttatttacgatgtaaatgacagaatttcggaaattgacattctccgtttcgggaacgggatatcggcgtctgatataactctcaagcgtatcggcagtgatttggtgtttgtacaccgcaatggggtggacagcgtcaccgtaaacagatgctttgattacgatgattatcgctacagaatggagtttgtagagttttctgatggtactcggtggaccaacagttttattgcgagtcagtttcttgaacttgtagggaccgatggtaatgatgagctgaaagggctggaaggctacggttcccaaattattttagggaaaggtggggatgatgtcatttcttccagtcgcggtaatgatctgctaaatggcggcaaagggaacgacactctaagtgggggcggaggttcggatacctatgtgttcgaattgggagacggcaaagacattatcatggaagtggatttcgacaacgatgtgctgagattcggtaacggtattgtcgctcgggatatcgccgtatatcgcagggattttgatctggtgctcagccattcgaatggtcaggatgaagtgctcgtcgcggaatggtttagtaatggtattggttggaaacaactggagcgtattgagttcgccgacggtacggtatggctcggtagtgatctgacaacggcgctgctgacgtttgaaggaagtgatcaagatgatcaattgtccggtgtgaaagccatgcaggaccaaatctttcggggtaatggcggtaatgacctactcgttggattcagcggtaacgacagtctatacggtggtaccggcaatgacaggctggaaggaggcggagggtatgacctgcttcaaggtggtacgggttcggatgtactgataggcggttgggggtgggacacctatgtattcaatttaggcgacggtgcggatgtaattgttgaggatcaatggccgtattcaaacaattatatcgataccgacacactcaagtttggcgccggcattacagcgtctgccatcattgtctaccggctgggtgacaacctgattatgaaccttgccaatgggcacgatcgtatcatgatcagccactggttcaaggacgggcctacgcctgggtattatcagatagagaaattcgagttttttgacgggacgcgttggaccagtgaaaacattcccgttgtttacggcattgtcggcactcaggcagatgatgtgttagtgggcgctgagccgtctggtagcgttttgcgtggtgtcggtggtagcgaccaattgatagggtctgacgcgaatgaccatctggatggcggaacgggcaatgatttattgcaaggtaaaggcgggtcggatatctactttttcagtgccggtgatggagaggataccattgaagaaagtgacagtttattcgacaccaatagcataatatttgcagagggcattaagacaactgatgtgttaatcagtgctcagggcgatgatttggttatattcaataaaaccacagcagacaaagtaactgtcaaagggtgggggatcacccagtcgattgcgagtattgaatttgttaatggtgttcgctggtcttctgacaatctttccggttttttatcaggcggtgtaaccaatacggataccggggttacctggaaggggctggaagggtacgcttggcagtttttttccggcggctcgggtgacgataccatcgttgcaaccaaaggtgatgatcaactatcagggggcaaaggcaatgatttccttaatggcggtgagggggcggatacctatatattcaaccgtggagatggccaggacacagtgctcgatttgagtcccctgtgggaaggtgtcgacatattaaagtttggtccaacgattaaccccgatgacttggtgcttacgcgtaacgggtgggatatggagtttggcattgcgggcacgacggatcgggttacggttaaaaactggtttttgggggaggagtggaatccagccgtcagccgctatcagatagaaaatattgaatttgcaaatggcgttgtatggctggcgggggagtatatttacaagtggccgacttcaggaaatgatttactgataggcgacgcaggtaataataaaattcgtggcggattgggcgatgaccggctcgcgggggccggagggagtgacacctattactttgcgggaggcgatggttgtgatgagattataggcgtcgccaatggcccggcggatgttgataagcttgttctcgaaggaatttcaatcaatgcgctctggttttcgcgaagcgctgaggatttaattatcgatgttctggattcgacggattcgataaaagttaccggctggtactcacaatcacctttgaccctgggttctattgaagtgggaaaccaagcattgttgaccaacgctgtcgataatttggttaatgctatggcggcgtttggagcgcctgcggggggcgaggttacgttgacaccgtctcaacgtgatcaagtaaatctggtgatagctgccaactggcaatgaaaaataaatgtaaagggcctcctctggagggcctttacacgcaggctgttcaaaaggatttgttcatggtccgtgtgtgtcgcgactctgtatgcgctttgtttatttttatcacgttggatgtccagtcacacagcctcgtgtccccgggtagagcggaactgatagctgtttatcatgaagccgcaacccacaatgctgaccttgccgcggcacgcttggactttgaggctcgccaagaagctattcctcaggcgagagcgaatcttttaccaatgatcagcagtggtgcgacatttgagtccactcggttggcgcgcgataaacctcaacttactcgagtgcgaggcggtgcaacgtatcaagccaacctgaagcagccgctattcaacgcggaattttggttcgcgttcaaagcggcaaaagcgtcggtaagtcaggcagcgttagagctgtcatcgaaggagcaggcgttgatcctcaagactgccgaagcttacttcgaaactcttcgagcctgtgacgagcgtgctgcttcagaggcggaagaggtggctttaaagcaacagatggatcaagcacggggcagattgatcggtggtttatccagtattacagacgtgctggatgcgcaatccgcattcgataatgctcacgccaatcgcaaactgtcagagcgcaacgtggaggacgctttcgaacaaatagtgctgttgaccaataaaaattatgaaagtatcgaaggtgtccagcacagattacctgttctttcacccattccttctgatgccaaactttgggtggacgcggctgtacggcagaatttaatgctgcaagccagcgaccaagcggtagcggcggcgactgaaacgctcagtcagcggcgttcggggcatgccccgacattggaggccgtggcctcgtatcgaaagggtgacaacgatagttttggttacagcaacccgaccgattttggtagagaaggatacggggataatgtggcgcaaagctccatcgctttgcaggttaatatcccgctatattcaggtgggcgggttgatgctcagacacgagagtcttacaagcgcttgagccagactgaagaactcagagaagcacagcgccgtgaagtggtgttcaacacgcgtagttactttcgagcggtcaactcggacattgagcaaatccaagcgagaaaaaagactattttatcgagtcaagaatcgttgaaagcgtcgaaggtaggcgctgacgttggcacgcgcaacacggtcgacgtgttgaatgcgcaacgacagcttttcaaggctgtgcgtgactacaacaatgcgcggtatgactacatcctcaataacctgcgcctgaaaaacgtggcgggtacgcttaatccctccgacttggaaagccttgcgcagtatttgaaaaaagattacgagcctcgccgggattttttaccgccggagttcacctcgtttgacttttaactgcgttgcaacgccgcacgtcggcatccaacgctggttttgccttatacccctcccacttcgcaatcaccaacggcgccagcgcgttccccagcacattcagtgcggtcgtcggcatttccatcagccggtacaccccggcaataaacgcaatgccttccagcggcagcccggcgctgcccagggttgccgacagaatcacaaacatgaaccccggcacgccggctgcgcctttggaggtcagcaccatggtcaccaccagcaacgcctggtcggccaggctcaagtcgataccgtacagttgcgccacgaacagcgtgccgataccgaggaacagcgaggcgccgtcgaggttgaacgaatagcctaccggcaccacaaagctcaccagcgaaggcggcacgccgtaggtttcgagttttttcatcagttgcggcatcaccgcggccgaacttgcggtggagaaggcgaggaccagttcatccttgatatggcgcatcaacgcaaacaggttgatcccgcacaaccgtgcgatgaggttgagcaccaccagcacaaaaaacacgatggacaggtagctgaccataatcaacttggccagcggcagcagcgagccaaagccgaagttggccacggtcacggcgatcatgccgaacacaccgatgggcgagtaggccatgatcatcgaggtgaccttgaacatcgcatcggacacgccgcgcatgagtgcgatcaccgggtccttgcgctcggccggcaggcgcgacaccccgaggccgaacatcacggcgaagaacagcaccgacaacaggctgccctgggccatggcactgatcacgttgtcggggatgataccgacgatgatctgccccaggctgtggccgccaccgttgctggtcggcagggtgatgtttgccgcctgcaagctggacagttcagtgccggcgccgggctctagcaggttgcccatgatcaggccgacgatgatcgccagggtcgtgatacaaaagaagtaactcagggacttcatcccgatacggcccaggctcttgccatcgccgtgcccggcaatgctgacgaccatgcacgcgaacacaatgggcaccacgatcatcttcatcagcttgatgaaaatatcaccggccggttgcaaaacgttgtctaccagccatggtcgggactcgggaaaacggtgcagcagggcgccgatggcgatgccggcgagcaggccgatcaggatttgccagaccagcggaatacggggcgtgtgcatgggaatgcctcatctgggatcaatgattttttgagttgttgttctaggcagtcaaaaggcggccttccattggccgccggggtgcaaccggggtgttcagcgcaggtcgtggcaggcgtctttgaggcgacggcagccttcttcgatctcagcccgggcgctggcaaacgacaagcgtacatacggcgacatgccgtacgccgcgccgctcaccgtggccaggccatagtcgcgcagcaggtagtcgaccaggtcggtgtcgctctcaaggcgtttgccctgtggcgtgagcttgcccatcaatcggctgacattggcgaacacgtagaacgcgccatccggtggtgtcacgcttaactcgccaatgcccgccagcaacctcaacatcagggcgcggcgctggcggtattcctcacgcatgtcggcgatgggcgtttggtcgccggcaaaggccgctactgccgccgcctggctcagggagctggggcaggtggtagtttgcgagagcagcttggcgatagcggtgatcagccaggccggcccggcaccgaagcccaggcgccagccggtcatggcatagcctttggatgcaccgttgacgatcagcgtgcgcggcttgaggtcgggcgccaggcgcgtcagcggtatgtgccgggcatcgccgtacacgaagtgctcgtagatttcgtcggccatgaccagcacatggggatggcggcgcaacacctcggccagcgccgacagttcggctgcgttgtacaccgcgccgctggggttgttcgggctgttgagaatcacccatttggtgcgtgggccgatcgcgtgttccagcacctgcggggtgagcttgaagcccaggctttcgtcgccggggatgatcacgggagtggcgtcattgagccgcgcgatgtccgggtaagacacccaatacggcgtatgcacgatcacttcatcgccgcgattgagcgtggccgccagcgcgtgataaatgatgtgtttgccgccgcaaccggcgaccacctcgtccagcccgtacaccaggtcgttgtcgcgttgcagcttcaggcagatcgcctggcgcaacgcgagggtgccggtggtggcggtgtagtgggtgtcgccgctgtgcagcgccacgctggcagcgtcacgaatatgcgccggggtgtcgaagtctggctcaccgacggtgaagttgacgatatcgcggccctcggcgcgcagtgccgtcaccaaggcgttggcggccacgctgggggagggcgcaatgcccagcacccggtcggacaaaaatgctgtgctcatggtgattcccttcagtccgccaggccggcgttgttcagcactttgtcgatccagctctggcgcaggttaccggtggcgatttcggctttgacggcttcttcgtgctcggcatgttgcccggcgcggcgcagtacttcggcggcgtcggcctgagagaaagccaccaggccatcttcatcgcccaccagcaaatcccccgggttgatcagcatgccgccgatggacaccggcacgttgacttcgcccgggccggttttatacgggccggtatgcaccacggcacgggcgtagcacggcgtgtcgtcgaagctggccacgtcacggattgcaccgtcgatcacaaaacccacgcaaccgcgttgctgggcgtacagcttgaccagttcgccgatcactgcgttgttggtgtcgccctggccgtccaccaccagcacgtggccgggttgcagcatgctcatggctttgtagatcagcaggttgtcgccggggcgggtcttgacggtgatcgccgtacccaccagcttgccggtgcggttgtagcgcgtcaggccacgggcgccgatgtggcggccgaggttgtcgctgatgtgcggcgtgaccacgtgggcaaacgcttggaccagctcggccgaggccatgggcgcgttgggaaggatgcgggaaccgggcaaggacatggcaaatctccagaatcgatggatagcgatgggcgatggccggatcttagaagtgatgaacggacagttttagcgatattttatgatgtgttagcatcgctttttctcatgagctggtcgccgtgatcaccttcaagcaaatcgacgcgttgtactggatcgccgaactgggcagtttcgaggcggccgccaacaagctgaacatgtctcagtcggccatctccaaacgcatccaggaattggaagaaacgttcgacgtcgagattttcgaccgcagcaaacgcaatgcccggttgaccgaaaagggcggcgagttgctcgattacgccaaggacttgctcaagagccgcgaccaactgctcgaacgggtcagcgcgcgggaggtgctggtgcgaaggtttcgcctgggcgtcactgaactcactgcgctgacctggttgccggccctggtggaagcgttacgccaggcttaccccaaagtacagatcgaaccttcggtggaactcagcagcgagttgttccgcaagctggagagcgaccagctcgatttggtgatcgtgcccgacgtctacagcgacccgcgttttcacagcacggcgctgcaatgcgtggaaaacgcctggatgtgctcccccggcctgatccccgacgccgacccgatcagcctggaaaccctggccagtcacaccgtgctcacccagggcgcgcattccggcacggggctgatctacgaacgctggctggcagcacacaacgtgcagatgccgcgtacgctgaccagccacaacctgctggtgcaggtgggcctggcgttgtcggggatcggcgtgagttacctgcccaaagcgtgcctgtcgcacctgatcgagcaaggtacgttgcgcgcgctggtcacccagccggaactgccgagcatccagtacgtggcgttgcaccgggtggatcggcagtttggtttgaaccaggacgtggcgcagctggcgcaagcgagctgtgatttttcgaagttgttgctttgagccggttcaggtgttcatggccgacaacctggccagcccggccagtgtgtcaatcaactccgtgcgcccatgcttgaggaacgccagttgataattcaccgccgccggtggcacttccagcgtcacctcctggaattcaccgcgctcaatttcccccacaaacaaacccctgggcagacagctgataccgaccccggcacgaatcaacgcgagcaacgcaaacaggctgttgctgccatacacgtggttgaactccagaccctgctcggcgaacagctgctcgcaacgctgggtgatgcccgagtccgggccttgcacgatgatcggccacagcgccagctgtttgagtgacagtgtggtgccggcgggaaacagacccggcggcgcgagccaggtgaactcgatggattgcagcgggatcgccgccatggcggcggtcacgtaatcctgcgggatcacgatcaggccgaggtcgccgtccagcaatttgcgttgcaggcgcgcggacaggtccacatccgggtgcagttcgatgtctggcagcgcggccttgctgcgggcgacaaagtcggtaaaccaggtgatggtcaccaattcggtcaggcccatgcgcaccgtgcgcagggtctggcggctggcgtcacgcagggcctcaaggccggccaggctgtggatcaggccttcgctggcctccagcaattcggtgcccttggcgctcagttgtaccttgtggttgccgggctggaacaagggcaggcaggcctgtttttccagctcctgcaggcgtttgctcgcggctgactgggtgatgaacaaacgcgtggctgcgcgctgcacggtgcccagtttcagcgtccagtagaacgcttcgatctgtttgatattgatcatgccggccgcccgaatggctgttgcaggtcgcaatgtgtgcccatcagttccaccacgtgccgatggaacgggctgtagctgtcggcccgggccagcgccacatacggcgtggtcggcaagggcggttcgacgtcgagcttcaccagttgccccgtgagcaggtaaggcgcggcggtggcgtcgggcaagtaggtcacgcccaaaccggacaccgtcaaaccgatcagcgctgccaggctgctgcacggaatatgcgcgctggggcgggcctgatgagacacaagccagctgtccatcaacagtccggaaccggaggatttgccctgggccagcaaggtaaaccgggtcagatcctccagcgtcagtggctgatgcgggtccagcaagccgggcgcgcagaaccagttgttacgcacttcgtccagccgcaccttgatcagcccgttgctgctgaaggcatccggcaccacgatcacgtccagttggccggccatcagcaacccatgcaagcgcacgctcaaatccacttcaggctcgatgcgcaccttggggtagtcggcggcaatcgcctggatcaggcgcggcagccaggtcagggcgctaagctcggtgataccgatgcgcagtttgcggctgagcacgtcggggctgagcaggcaactgttgacgatctcgcgttgcaacagcacctcccgtgcctgggccactacctgcgcggccaataccgtgggtttggccgcgcggccgctgcgatcaaacagcgcaaaacccagccagtgttccagttcctggatctgccgcgagatggccgactgcacctggcccaggcggttggcggcgccgtcgaaggtgccgtgatcgaccacggcaatcaacgcttgcagctgtttgaaggtgggcacgggggaattctcatcatgatttggaatgtttttagttcacggaatatctctatgtctacttaaatttcctcggcactatttcgctcacggcctactggcgtgagggtttcttcacgacgtaccgaccataactccaagaaaaaccggtgaagaaatgaatgctgattccaaacctgccagccgctttcgctgggtcgtggcggcgctgtttttccttgcgtacatggtggccggcgccgaccgcgccaatatcggcgtggtggtgccgttcatcaaacaggaataccacctgagcaacaccgacatcggggccctggccagcctgttctacctgacctacgccattgtgcagatccccgccggctacctgtttggccgctatggcatccgcaagctgctgaccggctcgctggtcctgacgtccctcgccaccttgttgatcggcttcaccagcagtgtgctgcaactcaaactggcgcgtgccctgctgggggcggcggaagggccgatcaacatcggcatcatttcgatcatcaaccgctggttcccggcgcgtgagaagggcttcgccaccggcattttcatgtcggcggcgaaggtggccccggcgatcgtgccgccgctatgcgcctggatcgtgcacctgtatggctggcgcgaggtgttctttatctttgccatcccggggtttttcgtgggcgtgttgtggtggtggctggtgaaggacgacccgtccgacagtcgccattgctcgccggccgagctgcactatattcaggacagcggccctcagagccaggccatgaacacgccgatggtgcgcattccggcggggttcgaccgcctgatgcgcacccgtgaagcgcccttgttgagcgacaacaaaagcatcctggcttcatggaacgtatgggcctgtgcgctgggctacttcctgatggtcggcatcacctattcgatcatgacgtgggtgccgacctacctgatcaccgtcaaacagtattccgtattgaaaatgggcatggtcgcttcggcgccgtgggtcggcgcgatcatcggcaacctgttgggcggctggctgtcggaccgcgtgttcgaccgtcggcgcaaaccggcgatgctgatcagctccctcgccactgtgatcatgatgttcgtgctgctcaacgcgcccaccgatccactgttgctgtcggcggtgttcctgctggcgggcatcttgttgaacatcggttactcgactttcctggtctacccgatgggcctggcgaccaaggcgcgcgtgccgttcgccgcgtccatcgtcaacaccggcggctcactgggcggcgcgttcacgccctttgtggtcgggctgctgctggaccatttcaattgggactacgtgttcggttttctcggcgtgagttcgctgatcaccttcgccatcgtgctgaccatgatcgagccacgtccttccacatccgttaacgcccaggagcgcgtatgaacagtgtcatgcaggtttgtcgtctggatttctggatcagccccgtgttcgacgaaatgatccttagccagccgcaactggccttgcaggtgatgccgcgccagggcgacgacgcacgcaccctcgcggcgctgcgcaaggcccatgcctatcacgtgtcggcggccaaggatgagctgcccgcgcagtggtttgccaaccaggcattgattgagcaatgcccggatttgctctgcgtttcttccggcggcgcaggttttgatacggtggatgtcgccgcgtgcacccgcgccggcattgccgtggtcaaccaggcgggagccaatgcgcactcggtggccgagcacacctttggcctgctgctggcggtggtcaagcgcattgtcgagtccgatcaaaagctgcgccacgccgttggtttcagccgggaagacttgatgggcgaagagattcacgggcgcacgatcgggttgatcgggctgggggaaatcggcgggcgcgtggcgcgcatcgcccacggctttggcttggacgtgttggcttatgacccgcatctgagccatgaaaacattcaggcccacggtgctacgccggtgaccctggccgagctgctgcaacgcagtgattttgtgtcgctgcactgcccgctggatgccggcactcgtcacttgatgggtgccgaacagttcgcggcgatgaagccggacgcggtgtttttgtccactgcgcgcggtggcattcatgatgaagcggccttgttcgaagccctgaaaaaaggccacctcagtggcgcggggctggatgtgtgggcctgcgagccgcccgcccaaaacgcgcccttaatgagcctgcccaatgtggtcgcgaccttccacaccgcaggcgtcacccacggtggccggcgcaatgtggcgcgctcgtcggccgcgcagatcgcggcgatcctgcgcggcgagcggccgccgcacctgctgaaccccgaggcctgggaggcggtcagcgagcgtatacgcgcgcgctgatcgtcatatgtttaaagtattcaaaccccgttatttagatatttttcataggtggacggcgctggtaggctcttaaaaaaacaagagaagtgcccggtcatgtccatacgcctgtccacctccatgaaacctttcaccctcgttttggcgacgcttgccttggtgagcacactggccagctgtgccaaggtcgatgtgcacagcgaaaacgccgacaagcctgaagccgatgcccgccaggtcttgcgcctgggccatgacggcagtgcctatccgtttctggtctacgccaacgccgacctctacaacccgccacagactatcgaacgcgccgtgatcatcctgcatggtgtgcagcgcgacggcgaccactacttcaacaccggccgcaaactgctcggcaatgcgcacctgcccagtgcaagcacgttgctgatcgcgccgaacttcctcacgcctaccgattccgggggcagtgatgacatgccgctgtggtcgcgcgaccggtggatgcacggcatcgaatcgcaattcggccgcaagggcattccggcgttccaggtacttgatgacgtggtcggctatttgtccgaccgccagcgttacccggcgctcaaggaaatcgtgatggtcagccactcggcgggggcgcaattgatgcagcgctacgcggtgatgaatgacctcgacactgccctcaaggcccacggccagacgattcgctacgtggtggccagcccgtcgagttatgtgtacttcgacgataaccgcctgcagggcggcgcgttcaagccggtggtgaccatcctgtgccccagctacagccgctaccgctatggcatcgagggcgccccggcgtacctgctgaaccaacacttgtcgagccgccaggtgttcgcccgctatgccgcgcgtgacatcacctacctggtcggcggccaggacaacaaccccaccagccgcgtgctggacacctcttgcggcgccaattaccagggcgacacccggcttgatcggcagttgaattacatcagctacgagcagttcctgtcggcccagtggcagatcccgctgcgccatccgcaacacacgattccaggcatcggccacaacgcggcgcggttgctcggtgataaagccgtcgcacggatgctcttcccttaagcctcacgctttcgcccaacgctgcgtctcgataaaaacaataagagaactgtatgagcccaactctccccgttacccgggcgccccgcgcctgggggcctggcgcattgtcgctgctggccgctgccttgctcaccacccacgcccaagccgacacgctgccgtcgtccggcaccttgttcgacaacagccgctcggtgctgcgccccacggacaacgcacaaccggcaccgcccggcagtgtgcgcattgaaagccagaacgatgagcccgcgcccgccaccagcccctcgaccttgcagttgcaggtgctgcggtttgtggtgaagggcaaccgcgaactcagcgacgccgaggtgcaggccgcgctgcaaccctatgtcggcaagacactcggcctggagggtttgcgtgacgcggcggcgcaagtcaccgcgctgtaccgtgcccgaggctacctggtggcgcgcgcctatctgccggcgcaggacattcaaaacggccaggtcacggtgggcatttccgaaggcgtgatcggccaagtcagcgccttgcccgacgcaaatgtacgcctgcgccccggtgtgcagcagcagttcatcaatgcactgcccaccggcaccatcatccgcgagcaagacctggagcgcgtgctgctgcgcctgtcggacatcaccggtgtggcggtgcatgcgatcctgcgcccgtcgcagcagccgggcgctgccgacatcgtgctcaagctcagcgagatgaccgcgattacggcccgcgcgactatcgacaactacggcaattactacactggcgccaaccgcctgacctccagtgtcagcctcaacgacgcgctgggcctgggcgacagctttaccgccacctcgcagaattctttcgaaggcctcaacatcaagggcgtcggctaccagcagccgctgggcgccacgggtatttcggtgggcgccaactacgccgagctcgaatacagcatcggcaagaacctcaagggcctggacgccgacggcaccgcgcaagtctcctcggtgtttatcaacagcgcgctgctgcgctcgcgggacagcaatatcagcttcaacctggccgaagatcaccggcgtttcgaagactcggccggtggctttaccgtgaacaaatccgcggtgtttcgcagcgccacgctgtacggcaactggcgtgatgactggcagggcagcaacgcctggagcctgtcttacggcatcggtgacttggacaaaaataccgccgccgacgccacgctggatgcgctcaccgccaacgccgccgggcgctacaagaaagccaacgccagtttcagccgcctgcaaaacctcggcggtggttactcgctgttcggctcgttgaccgggcaatgggccgacaagaacctcgactcctcggaaaaactcagcctcggcggccccaacggcgtgcgtgcctacccggtcggcgaagtggccggcgacgaaggcctgctcggccgcctggaactgcgcaaatacctcggccgtttccagggcgccattgccgaaggcacgctgtttgccgacgcgggcaaggtcaaggtcaacaagaacccgtgggacgccagcgaaaataccctcacacgctacggctacggcgtgggcctgaacctctatcaccgtgacctggtgatgaacaccagcctggccttttcgccgggcgccgacccctccagcgacgaccgcgcggccaagcgcctgtggttctcgatttccggttcgccccaagcgttcgccgggctggccagcgacctcggctccaaaggcgaagacttcgaagtggccgagaccgacacggtcatctacggcgacttcggcatcgttcccgaatacgttgaccgccacggttccacacccgccgcgcccgccaaccagaaccgcctggccacgccgaacgggcgcaacatggcgagcttctggcgcgcccgcgataacgtctcggccatcggcgtgcacggcggctatggcctgagcgacgactggaaactgctctggcagctggaatacggcatttcgatgaactacaccgccagcgatgacaaatcggtcaacccgtcggcctctccaagtaccaaattgcgcaacaccggcgcggcgttcaacaacaccgattacggcacgctgctgtatggcgtgtgggacatgccgatgaaggaggccaccaccagcctcgacccgttcaacggcaaaaccagcgccgcctacttcaacatcatcggctcgccgggcttcagcgccgggctgtcgaccaacgtcaacggcccgcaaagctttgacgacacggcggtgaacggcgatgcggcgttcaaccggcgccagtccggcgtggtggagtactggacaccggtgtggaacggcctgcagctcaagctggcgtattcgaacaacggcatgagcgtggccaatgatgtggacaagggctacatctacgggaccagcctgagctacaacaacggcggtttcacggcggtgttcgcggccgagcggcacatcaactatttcggcattgccgacctgggccgtaacgcccgtgggttgggcagcagcacccacgttaccgatggcacctcttcggatgatttcagctttcgctacggcctggcctacgactttggcgacaccaagctgtcggtcatcgccgacgacctgtcgtactccgaagatggcgtggtcaacaccagcaccacctccagcgacctgtcgcgctatcgccgccgcgcctatctgttgggggcgagccacaagataggtccctggaccttgaaggccagctacggcaaggccctgccgggcaaatgcgaaatgatcggcgccgccgcccccgactgcgatacccacggcatgggcgccacccaatacgcggtcggcgccaactacaaactgaccaagcgcatcgacctgttcggccaatacgtgctgctgaaaaacaactccctggccaactacaacttcgccttgactggcgtcacggcggccagcggctactcgcccggcgtgggcacgaccattagcgccatcggcactggcatcaactattcgttctgaggagaaggctgtgagcaaaccccaaatccaaaccgcgctgcctgttctcaaacccttgagttttgccgtgctctgcgcgctgtacagcctggccccgatgcccgcactggccctggacagcaacgcgctgcccactaacggccaggtgatcgccggcagcggcagcctgagcagcaacggcaacgtgttgaccgtgcaccagggcagtgaccgcctgatcaccacctgggacaccttcaatatcggcagcaacgcccaggtgaatttcctgcaacccggcgcctcatcggtggcgctcaaccgcgtgaccggcagtgacggctcgcaaatccttgggcacctgaatgccaacggccaggtgtttctggtcaacccccaaggcgtgctcttcggtgccggggcgatggtggatgtgggcgggctggtcgccagttcgctgaacatctccaacagcgatttcatggcgggtaaaaacgttttcgccgggcccggcggtggtgcggtggtgaaccagggcacgatcagcgcgcgggacggcggcagcgtggcgctgctcggcgcccaggtgcgcaacgaaggcacggtggttgcgcgtctcggttcggtggtgttgggcggtggcgagaaaatcaccctggatttcaacggtgacggcctgatcaacgtcgaggtcaacgacccggccatcggcgccagcgtaatcaaccggggcttgctcagcgccaacggcggcgccgtggccatgaccgcccgcgactcccaggccatgctcagcaacgtggtgaacaatgagggcatgatcgaagcccgcagcctgcaacaacgcaatggccgcatcatgctcgacggcggcgacagcggcgtggtggtcaacagcggcgtgctggacgcgtcgggcaaacatgccggtgagcgcggcggcaacgtgaccctgaccgggcagtacgtcggcctgttcgacagtggccgcattgacgccgatggcgatgtcggcggcggcacggtgctgatgggcggtgattaccaaggcagtggcaacctgcaccaggccgacagcaccttcatgggcagcgacgcgcgtatcagcgcgaatgccttgagcagcggcgacggcggcaaggtgatcctctggtccacagacagcacgcagttctacggcgccatcggcgtgcgcggcgccggaaagcaggggcgtggcgggttggtggaaacctccgggcatgcgctggacgtggccggtatcgtcgacctcagcgcggtgtcggggcagggcggcagctggttgattgacccgttcaacatcaatatcaccagcggcgccagcagcggcacgtcgagcagttcgccgttcacgccgaatgccggtggcagctccaacctgagctcggccacgctgaatgcgtccttgtcggaaggcgcgaatatcctcgtgaccacctcctcaggcgcgggtacttcgggggatatcaacgtgctgtccaacgtcaagggcgtgggcaatgcgaccctgactttgcaggcgcaccgcaatatcgtgatgaccaacaccagcatcagcaatggcaccggcaagacgctgaatgtctcgctggtgtcgaacttcaacaacagcggcaacggttcggtagccttgagcaacgcgagcatcagcaccaacggcggcaacctgaccatcagcggcgctgcgaacccggccacgtcctgggcaagcaccaacgtcagcaacggcacgggcatttcattgagcaatggcacgcaactgaccacccgcggcggcaacatcaccctgcgcggcgccacgtcggcaacgctggcggcgggctccacggccaccgcgatcaacatcagcggcagcacgctcaacgccggtggcggtaatatcagcatcaatgccttgcaggccagcaccagcgggaccggcgatgccttcgtgctgaccggtggcagcagcctgctgacctcgggcgcaggctcgatcagcgtcgacagcaacaacctgggcagcggtaacggcacgcgcattttcagtaccagcaatacccttgcggccaccggcagcggcaatgtcagcgtgcgcggtagcgcggcgtcgggtgcggcggtgctggtgtgctccacggcagcaagctcgacccaaacgctcagcgtgggcagcggcacgctgaccgtgcagggcagtggcggtgggcgcggcgtgttccttgcggcgtcgggcaacggtgccgtcaacctgaatgcggcgcagggcggcgacatcgtgatcgacggcagcagcaccagcagctacggcacgctccttaacgccaccggcgccacgtcggcgatcaacctcaccaccgacggcaacatcagggtgtccggcgtcacctcgggcggcaccacgccagccttggcgttgatcgcgtccggcaacggcacggccgccgcgccgggcgcgcagatcaacctgaccagcacccgtggcaatgtagcgctgaatgccaaccacaacgccgtgagcaccgccaccggctcgttcaaggccatttcgctggacgctggcggggcgttttcagccatcaacctgtcgacccaaagcggcaacctcacgctggacggcaccagcacctccgggcgcggcgtggacattgcgccatcaggcgtaggcgctgcgatcaacctggcgaccactaccggtgatatcaacctcaacggcaacagcaccacgtcgtttggcggctatgggattttcttcaactccaccggcaattcacaaggcgtgagcgtcagcacgggcaccggcgatatcaccttgcgtggtgactcggtgggcacctccgacgccatcgccctcggcggcagcaccggcaatggcagctccagcaaccgcattacctcaaagggtggcgacatcagcctcaacggcaacttccactcgcccaacgccggcgagctggaccacggcattgcgatcctcagcgtcaacaacatcattcagaccaccggcaacggcaacgtgaccctgaccggcaacgcccgcgatttgggcagcggcatcgaggtgtacggcaatggccgggcgcaattgagtgtggaaaatggcgcgctgacgctgaccggcagcagcggtgcgggggacgggattggcctgttgaccgggcagaactcgctgcgcgccacgggcagtggttcggtcacgctcaatggcacgtcggacacggcgtcggggatcaatatttttccgtccgggagcagcagcgccgtgacgatttccacggccagcggtgacctctcgctggccggcacggcaggcccggcgtcgggtgcaccgggtatcagcatccgcagcggtgcgtcgggggcgggcaatggcgtgaagattgtctccggcagtggcgatatcaacgtgacgggcaccgcccttggcagcggcgccggggtggccatcggcgcaaccaatgcccggggtttcaactcgctggtgagcggcgccaacctcagcgtcaccgggcgcagcacccgtggcgcggccttgagctttgacagcggcaccaataccttgcaggtcgccgacggcatcctgcgcctggacctggacacgccgtcgggcaacttcctcagccagaacaacgacagcacctcgatcaccgccacgggcaacggcgcggtgttgatcgaccgtggcggaatcattcacaacgggctgctgccggtcacctctgaacctacgcggcaataccatcaaagccagatggtcggcgacacctggcgcaaaccgttgaccggcgactatcacctcacgccgctgggcagcgcggcggacgaggtgagcattgaagtcgcccagggagcgtcgcaatgaccgaaccggcgttctccctcgaagccttcgaatacctgtgctacacccgcgaccatgagggcggcgcccgcgagctggtgcgcctgctgcaattgatcgaccgcaactacggaaaactgtccgagcagttttccctcagtgtgtccccggcagtcaccccgggcgagctggaaggccatgtgctgacgcgcctcaccagcgccatcacggcgctgctgtccgacccggggtttaccctcagcccgggcgggttcggccagttgatcaacctgcaacgctggctgtcgtcgctgtttgccgccagcgcgtttatcaattgcgaccacatcctgcgttcgctcaacctgctggggccgaacggcaatgactaccgcctcgccgaacaggacctggtgaaattctgcctgctgtattcgcccgaatcccagttgccgttggatgtggagctgctgtgggcgcagaacccgaccctggcggcggcgttgttcatggccttgatgtcgcccaggtttctcggcacgccagcggcgcattccaagcgcgaggccttgctggcctggttgccggggcgcttggaaacgcttgagcatctggatgcattgccgcttaacgtgctgcatgacgtgtacatgcattgcagctacgccgacctgccgcagcgccatcgtatcaaggcgtcgatcaacacgctgatcgaacgcaagctcgccagcgtgggcattcttggcgtgcccgccgcgccgcaaccggcccgcgacaagccgctgatgctggtgctgctggagtggttttccggcgggcattcgatctaccgtacccactcgctgacactgcaggcggcgcggcgggattttcacgtggtggcgatggggtatgcggccaatgtggacgggttggggcgtgaggtattcgacgaattcattgagttgcgcgagccggatgatctgttctgctgcctgcggcaaatcacggcattcgctaccgaacagcgccccgacgtgttctatatgcccagtgtcggcatgttccagatcacgatgtttgccagcaacctgcgctgtgcgccgttgcaggtggcggcgctggggcacccggcgaccacggcgtcgcggcatatcgactgcatcagcgtggaagcggattttgtcggcgacccagcttgtttcaccgagcgcctgttgcaactgccggccaatgggcagccgtatcggccgtcggcgattgcggttgagctgccgcgaagggtgcggcacgacactgaatgggtgaacatcgccgtcgccgccaccaccatgaagctcaacccgaccttcttgcgtgcgtgtcaggcgattgccgtgcgcacgttgcactcgagcggcaaacgcgtgcgttttcactttctggtggggcaggcgcaggggctgttgtttccgcagttggtgcggttgattgaacgctatgtcggcgatgccacggtgtatccgcaccaggcctatgcgcactacatggccacgctgaacggctgcgacctgttcctcagcccgtttccgttcggcaataccaacggcattatcgacgccttcaccgtgggcctgccgggcgtgtgcaagaccgggccgcaagtgttcgagcatatcgatgaagggttgtttcggcgggtggggttaccggcatggagcatcgcgcgaacccatgaggagtatgtggaggcggcggtgcggctggcgggcgattacgccgaacgttcggcgttgtatcggcatctggaaaccagcaacccgttggaggtgctgttcagcggcgagccgcatgcgttgagcgaggcattgctggctgagctttctgcgctgaggtgagccggcttgccacaggggggcttgtcactccacccgcaccagcaacgctgtcgtcagcgcaacaaaatcatcatacggctccagcgagcgctcgaccttgccacgcagcaccgtcccttgcagggcgttgatcaaaaaacgtgcggtcggctccgggtccagcccctggcggaattcgccgcaggccactccttcacgcaccaattgcgcaaaaggtgcggcccattccagcaacaggcgcgcgatggtttcgcgcacttcgtcgtgccgcgtggccatttcggcggccaggttgccaatcaggcagccatagcgaaaggcttcaaggcgtgcgggggtagagatgccgatcaacccgtcgagtttgcccatcgagctcagggccgggtcggccatgatcgcctgtgcgtgttcgctccagtccttgaaatagccgttgagggcttcgctggcaaaggcttccttggagccgaaatgcccgaagaacgagcctttctgcatgccggcgtgttcgacgatggcgtccaccgacgaaccggcgtagccctggcgatgcagcacctcgatgcccgctgccagcagctcatccttgcgtgatgggcgccccatgtcgtgcctccggttatgcaattagttgaaataagtctaggcgcggtgcttgacgccagtcaaaccgactggtcagtatataaacccatttgaacccgacgagcatcaacccatgaccaacacagtagtggtgtatttctccggctacggccacacccgccgcgtggcgcacaccgtcgcagaaggcgcacaggcaaagctggtggaggtgaccgaaaacggcgacgtgtccgaagagggctgggcgttgctcaacgccgctgacggcatcatcttcggcacgccgacctatatgggctccagcgcctggcagttcaagaaattctccgatgccacggcccagtactggtttacccgaggctggcaggacaaggtcttcggcggcttcaccgtcagcgccagtttcagcggcgacaaacaagtcaccctgatcggcctgcaaaccctggcttcgcagcacggtggcatctgggtcagcctcggcttgctgccggccaataccctggcagcgacgcgcaacgacatcaacaacctgggcggttcggtgggcttgatcgtgcaggcgccttcggatgcggatgcttcggcgatccccgaaggggatatccagacggcgctgctttatggccagcgtgtggcgacgattgcggcacgcctgaaagcggccagctgaggcggttggatttatgcaccgggtactgataaacaggaggtcattcttcctgtacccatacccggtgtaatccatcatgaagcgccatttcgaggatctgcagctgggcagcatcgagctgttctgccttgccgccgaagccagcagcttcaccgccgccgcccaggttgccggtgtgaccccggccgccgtcagccgcagcatttcacgcctggaagaacgcctgggctcacgcctgttcgtgcgcaccacccgcagcatccgcttgaccgacagcggccgcacgttcttcgagcaatgccgccaggccctgactcaattggtcgaggcgcaacagcaagtgatgggcgcccaagccgtgccgtccggcttgctgcgcatcagcattcccaccacctacgcccatcatcgcctgctgccgttgctgccgaaatttcgcgcgttgtacccgcaagtgaccgtggatgttcacatcagcaaccgcaacatcgacttcgtcgccgaaggctacgacctggccgtgcgtgtgcgcgcccagccggactcctcactcatcgcccgattgctcgaagacgccgagctggtggtggtggcggcgccgtcttacctgcaacgcgccggcatccctcacaccctcgaagacctggccgcccacgaatgcatccagtacgaactgcccagcaacggccggcgcatctcgtggctgttcaacgtggagggcaaggcgcgggagttcgcgggggaggcggggtacagttgttccgacgatgtgctgggtggcgtgaccctggcccggcatggcgcagggttatttcagacctaccggtttatcgtcgagcaggcgcttgcggatggcagcctggtggaggtgttgaaaccctttggcggccgttcgcggccgtacacattgctgtatccccacgggcgctatgtgccgcatcgggtcagggcgtttgtggattttctgctggcatctcgggatgagagggcggcgctggccacgtcagcaaaacctgactgatggctgcgtcaatggtttcaaagggcgtgttatcccgcgccagaatcgaaatgccctgcaagaaactgtcaaacaccgtcgccatcacctgcgggtccagcgcgccaggcaagtcaccggcattcactgcgcgctgtacacacgccacgatccccgcccgcgtgcgcaaccgcgattgcgtcaatgcatcggccacccgcgcgttctccgggctcggcgcgctcatcacccccaacgtcaccatgcagcccttcggatgggcgttgtcgcactgcatgcgcgctgattggcgcaatgcggtctcgaccgcctcgcgcggtggcaggcattcgttccacaggcactcggtgacttgggcgtaggtcacgaggtagcgctgcacgcattcatcgaacaaggcttccttggagccgaacgcggcgtaaaagctcggcgcagaaatacccccgcccaaaccggccttgagctgggcaagggaggttgcgtcgtagccatgttgccagaacaggtgcatggcctgctcaacggcttggtcgcggtcgaaattacgcgggcggcccatttgtgccatgtgcggtactcctgtggaaacgagatagatactagtcgatacataagtcattgacaacgcgcggtgcgcgcccgcaacatttgtatcgatcagtatttaagtcgccccaaggagcttcccgtgaccccttcactcagtttgtctgcgtcatccgaccgcctgcccatcggtgccttgcttgccctggccatgacggggtttatctgcatcgtcaccgaaaccctgcccgccgggctgttgccgctgatcagcgaaggcctggcgatttcgccggccatggccgggcagatggtcaccgcctatgcgctgggttcggtgctggcggtgatcccgatgaccatcgccacccgtggctggcgtcggcgcaatgtgctgctgctgaccctcgtcggttttctgctgttcaactcgatcaccgcagggtcgtcccactatggcgtgaccctggtggcgcggttttttgccggggttgcggcggggttggcctggagtctgctggccgggtacgcgcggcgcatggtcgcgccgcaccagcagggcagggcgctggcactggcgatggtcggcacaccgattgccctgtcccttggcgtgccgctgggcacctggctcggcggactgatgggctggcgtaccacgttcggcctgatgtcggcattgagcttgattttgatggtgtgggtgctggtcaaagtcccggattatccaccgcaggccgcacatcagcgtctgtccctggcagaggtgctgaccacgcccggtgtgcggccggtgctggcggtggtgatcagctggatgctggcgcacaacattctgtacacctacatcgcgccgttcgtggcccgggccggtttgggcgaccgcgtggatgaggtgttgctggtgttcggcctcgccgcgttggcgggtatctgggtcacggccaaattggtcgaaccggtgctgcgcaaaacggtgctggtgagcctggcgatgtttgccttggtgagcgtggtattcggagtgtcgggaaatgtgccggcggtgatttacctcggcgtggcggtctgggggttgagctttggcggtgcggcgaccttgctgcaaacggcactggcggacgcggcaggcgacggcgcggacgtggcgttgtccttgaatgtggtggcatggaacagcgcgattgccgccagtggcgtagtcggcggtgtactgctggaggcttggggcgccacgtcgtttccctgggccatgctgctactgattgtcgtgtcgttcatgattgcctgggccgcgcaggcccatgctttcaaaccgggtgcgcgcagtgcaggaaaaccggcggccagggggcactaatgtgacttggtccggtcaataaccctcgcaatatcattcacttggctccattttatggagcctgccgcctcagttctcttcaaagaagtcatccatgcacctgcgtacccttgcagccgggctgtctgcccttgttttgctctccaccggcgccgccgcgcgcaaccttcccgacctttactcccaacaggaaaagcagctgtccttcgacagttgcgcggacctgtttccagcctcaaaccccatcaacaccgccaccgtccccgcgaccatgaaacccatggcgttgtgctcggacaattttgcggtgctttactcgcaaaccagcaagacgccgctggtggtggttgagcgcctcaacgccgcgcaactcaaagacgccaaaggcgaagagcgcaccaaccagttctacgccgacccgcgtatccccaaaggcgcccgcgccgagttgagcgattaccgcgcccagcacccggccatggaccgtggccatcagtccccggctgccgacgcaccgagtgccaacgccatggcccagtcgttcgcgctgtcgaacatggtgccgcaagaccccaccaacaaccgcaagatctggagcaaggtcgaggcggacgtgcgcaagtttgccgtgcgtgccggcggcgatgtgttcgtgttcaccgggccgctgtttgacgcgggttacgccaccatcggcgacaacaaggtctgggtgccgacgcgcctgttcaagctggtgtacgacgcatcgtccaagcgggcctgggcctacgtgctgcccaacgctgagacgcgtatcgaacggccgatggactatgaaacattcgtgaagaccaccgggctcaagctgctcggcaatctaccggttaaggggtcggtgggtcggacttgatccactgaggcttgtccaactgacgcttcatcgtccagatcgccacgcccacggcgaggatgcccgacaccgcgccgaccaccagcgaccaccgtggacccaggtggtcggcgacccagccgacaatgggtgcgccaatcggcgtgccgcccagcgccaccgccacacgcaaggcaatcacccggccgcgcatggccggttcggtggtgagttgcatcaggctgttggtggtgttgctgaaggtcatcgcgcccacgccgatgatcaccagcgcaatggcgaacgtccaatagttcggcgccagggccgccagcgtacaccccagcccgaacaccgcagcgccggtcagcagcgacttgaactgcggccgctcactgcccgccgcgatcagcgcgccggcgatggtgccgatggccagggtcgacgtcagcaggccgtagccgcgtgcatcggcatggaacacgctgacagccatcgtcgagatgaagatcgggaagttcatgccgaaagtgccgatcaaaaacagcatcagcaaaatcgccttcaaatccggacgtgcccagacatagcggatgccttcagtaaggctgcctttggtgcgcagcgcacgcactttggcctggccggacacccgcaggaaaaacaacgacgccagcacggcaaagaaacttgagccattgagcaggaacgcccagccggtgccgactgaagcaatcgtcacgccggccactgccgggccgatcatgcgcgccatgttgaacgacgtggagttgagcgcgatggcgttggacaagtctttctcgcccaccagttccgccacgaaaatctgccgcaccggcgcatcgaacgccgaggcgcagccggacaaaaacgcgaacacatacacgtgccacagctcgacaaacccggtgatggtgaacacccccagcgtcaacgccaaaaggcccatcaccgcctgggtggtgatcaacaatttgcgctggtcgtaatggtccgccgcaaacccggtccacggcaacaacagcaactgtggcccgaactgcaaagccatgacgatgccgacggcggccgcgttgtgcggggtaagctgggtgagtaccagccagtcctgagccgtgcgctgcatccaggtgccgacgttggagaccagtgcgccggctgcccagatgcggtaattacggctgcgcagggagcggaaggtgccgagcaaactcatgggtttttcatgccccccggttgtcgagcaaagcaaggatggcctgcgtggtgcccgactcgccgagcttggggaacacgttattgaggctgtaggcgtgggcttctgcgttggcgtcggtcatggcgtcggtggcgagcgtgacgttgaagccggcctcataggcctgccgggcggtggcctccacgccggtgccggtggccacgccggtgatcaccacctggctgactttcagcgccttgaggtgtgcttcaaggtccgtattggcaaatgcgccccaggactttttggtcacctgaatatcgccgggctgctgcccgagttcgggaatcaggtcggcccaaccttcgggcagcacatcgctgcgccgtggccgttcggtgcgccccggtgcgaagcctgtgacgttgaccagcaccaccggtaaaccgcgctcgcgaaaggcgtcgagcagagcgcgcgagcgttcgatgacggcatggatgggatggatgaaggggtaaccgatgatgccttgttgcaggtctacgatgatcagggcggtggttgggtcgagcgaggtgacagccatgcgatgtcctcaatcagtgcgttcaaaaatcggcgaggcgttccagcagttttaccgcagcagcgagtttgtgttgttcctggggggtcagctgttcttgcagggcgtgcagcagccagtcgtctttggcggcgcggctttcgatcaggtgtttgcgcagcgtgggtgtcagttggatcagcgtttggcggccatcgctcgggtcgggttggccgctgactgcttgcatggcttcaagcccggcaacggtgatacgcatggattgcgggcgcacgctttctgcacgggcgagggcggacacggtggtcgggccgtcgcggtccaggcgcagcagtacggatttttgcgcggaggtgaaatcgtcggggtgggtttgttcgcgcaagcggcggatcagtttgcctagggatatacgcagctcggcagccagcgtggcggcttggggattgtgatcggagggggatttagtcatgccgggacggtagcatgatggaagataaactgtacagtttggctgtattgttttttggtctaactggggttgggtttattcggtttggttgttgggggtatatccgttatttggggtgatggcttatatgggttccgcccttacggcgggtcactttgaaaagcgcaaagtaaccaaacgctcttgcccctacactcggtgcctcgccaagcctgcgttcggccatcgtgtttaacggggcgcccagaatcaagatcaaaggaaaaagcacggcggcctgacagccggcctgagtggttgaatcaaaagcgctttttttgctagagcagatgcgttcctccagacaaatgaagatcaaaatgtgggagcgagcaagcccgctcccacatttttttgaccgagtgaacctctaatctctgcacaaatctgcttctctgtgggagctggcttgcctgcgatggcatcaaccgggtatgcctgatgtacctagttgcctgtatcgcaggcaagccagctcccacacaaaccgcgtttgcttcacaccactcaggccggctgtcaggccgccgagctttttcctttgatcttgatcctgggcacaccgagcgtgagcgaggtgccgagtgttggggcaagagccctttggttactttggggctcttttccaaagtgacccgccgtaagggcggaaccaatatcagccccccaaaaaaaacggatatgtacccaaagaccagctccccccaaaaaaatgtgtagatacctacgatttaacgcgcgtttatactcgaccccttttgaccaacccccctcacacataccggaacccccatgagcaccacccacctcatcccccaaacgcgcaaacccgtcgcgccgctgctggccttcatcatcctgatgctcggcgccctgttcctgcaaaacagcgtcggcgcgcgccaagtgctgttgctggtagtcggcgccgcgctgggcctgaccctctaccacgccgccttcggcttcacctcggcctggcgggtgttcatcaacgaccgtcgcggcgccggcctgcgtgctcaaatggtcatgctggccatcgctgtcgtgctgttctttccggccttgggcgcgggcaccttgttcggccagccagtggtcgggctggtggcgcccgctggggtctcggttgtattcggtgcgtttatcttcggcatcggcatgcaactggggggcggctgtgcctcgggcaccctgttcaccgtgggcggcggcaacgcgcgcatgctggtgacgctgttcttctttatctgcggttcgctgatcgccacgcaccacgtggattggtggtttgcactgccggcgtttccggcggtgtccatcgtcaagagtttcggcgtaatgccggcgctgctattgagcctggccgtgttcgccctgattgcctgggtcaccgtccgtttggaaaagggccgccatggccagcttgaggaaggcatcaccagcccgcacaccggcctgcgccgtttcctgcgtgggccgtggccgctggtgtggggcgcgattggcctggcactgcttaactacgcgaccctggcgttggccgggcggccgtggggcattacgtcggcgtttgcgctgtggggcgccaaggtggcgagtggtttgggtgtggacgtggccagttgggcattctggcagatgccgggtaacgccaaggcgttggctgcgccggtgtgggaagacatcaccagcgtgatggacgtaggcatcatcctcggcgcgttgctggccgcaggcctggccgggcgttttgcgccgagcctgaaaatccccgcgcgctcgctggtggccgcggtgatcggtggcctgctgctgggctacggttcgcgcctggcctatggttgcaacattggtgcgtacttcagcggcatcgcctcgggcagcctgcatggctgggtgtggctggtggcggcgtttatcggcaatagcgtgggcgtgcgcctgcggcccttcttctttgcgggcgagcggccgcaggtagcattgagcggttgctgactgattaaccttgagcggtagggtgccaggatgattcgagagttgagaacctttgtatccgccgcacggcgcggcacctttgccgctgccgggcagcaggtcgggctgacgcagtcggcggtgagcgcgcagatcaagcacttggaggacgcgctgggggtcaagttgttcgaccgcaccgggcgctccgccacgctcaatgccgccgggcagcgcgcagtgccgctggccgaggagatcctcgatatcttctcgcgcatgggcacccccgacagcgccaacaactttcacggttcgttgcgtatcggtgctatcggcagcgtacaaaccggcatcctgccccaggccctggtggcgctcaaacgccgtgcgccatttatcgaggtgagcctggtgcccggcgtgtcgctcaacctgctcagccaggtggatgcgggcgagctggacctggcgatcatgatccatccgccgttcaacctgcccaaagacctcaacatcgaagtcattgcccgcgagccgtttgtgctgatcaccgcgaaggacgtggagggcgacgaccctttgcagatcctgcgcgagcaaccttttgtgcgttacgaccgtggctcgtttggcgggcgccaggtcacgcagtttctcaaggaacacaagatccagacgcaacaggcgctggagctcgacgagctggacgctatcgtcaagatggtacgcagcggcctcggcgtgtccctggtgcccctggccggtttgtggctggaacacgacgccgaggtgcgggttttacgattggacaagctcacgttttatcgcgaaatcgtcttgctgaccaagtacacccagcgccaactgccgctcttcgcgttgttcaggtcgtgcatcatggaagtgctgggtgcgcctaaatagcgcgcgagcatcgaaattattgaggctcaggacgaaagatatccgctttatccccacggttttctggtgaagaatcgagttctaaataacagaacgtgcaggtaaccaccgtgagcctttcaccctttcatctggcaattcccgtctatgacctcgccgctgcgcgccacttctacggcgacgtattcggcctttcggaaggccgctccagcgcgcaatgggtggacttcgacttctacggccaccaactggtgatccacgaacaccccaagaccgaatcccaggaatcggtgcactccaacccggtagacggccacgacgtgccggtcccgcatttcggcatcatcttgcagtgggagcagtgggaagccctggccgaccgcctgcgcgcccgtgaaacccgattcgtcatcgaaccctacatccgcttccagggccaggtcggcgagcaggccaccatgttcctgttcgacccctgtggcaacgccctggaattcaaggcgttcaaagacatgagcctgctgttcgccaagtaagcctgactcgcgcgaccgtcgccagcagagcgacggcgttaacaatacgtgaagcctgaccgggcctgccgcctgcgagatacgacgttatgtccgacgttaactgtgatgtccgtgaaccgctgcggccggtgtgtgccgagccgcagtggcggttcgagccttgtggtgacagctgcatcgtggtggtctttgccagcgtgttcagcgtccaggccaatcgtcgcgccgtggcattgagtgccacgttgcatgaccggctggcgcgcgggttgctcacaggcgttacggatgtcatcccggtgatggtctcggtgggcattcactattgcccgcaagtgttcgccacgctttaccccgaattgatgccctatgacgcggttgcccacgtgctgggcgacaccctgacacacctgcaaaacgcgccacacaccacccccaaacgcctggaaattccggtgtgctacgagggcgattgcgcgccggatctgcaggccatcgccaccgcctgcgccatgaccccaggcgaagtgattgccgcacataccgctcagtgggtggatgtgctgatggtggggtttgcaccgggccatccttatatcggcatgcacgaccctgcgctcaagctggcgcgccgggctgtaccgcgcacgcaggtgttacgcggcagcgtgggcctggccaaccgccagagcgtgatttacccctcggatttgccgggtggctggaacattgtcgggcgcacgccgttgacgatgttttcacccgcccatgagccgccatgcctgctgacgggcggcgatcaagtgcgttttgtaccgatcacggcccgcgagtttgagctcatgaggggagagcagccatgaccctcaaagtgattcggcccgggttgttttcctcgtttcaggataccggtcgcgtgggttttcagcattggggcgtgccggtcaacggcgccatggacccggacgcccatgcgctggccaacctgttggtcggcaacccgatcagcgctgcgactctggagatgacgattcaaggcccggtgctgtgctttcaagccaaggcgttgattgcgctggccggcgccgaccttggcgcacacctcgatggcgttgcgctgaaaccggggcaggccgcctgcgtcaagccgggcgcggtgctgtgttttgaaaagcgcgaatacggtgcgcgtgcctacctggcggtcagcggcggttacctgctcgacccggtgatgaacagccgcagcacctacagccggggcgggtttggcgggttggacgggcgcgcgctgaaagccggtgatgtgattccgatctgctcgtccttcgccaacccgccgcgcctgaatatcccggccggtttgctgtttgccgcgcccacccggccggtgaccatccgggtgcttcaagggcgcgagtgggccgatttcagcgaaaccgcacggcatgattttctcaatgagccctaccagatgaccgccgcgtcggaccgcatgggctaccggctcgacggcgccgcgctggacctgacccaacccaggcaactgctgtcagaaagcgtggccttcggcaccgtgcaagtgcccgccggcggccagcccatcgtactgatggcggaccggcaaaccaccggtggctacccgcgcatcgcgcaagtggcgagcgtggatttgccccggctggcgcaactgatgccgggcgatgaaatccgcttttccctgattgatctgcgcacggcccagcacctgctggtagcgcgtgcccgcaccctgaaaagactggaggccgcccacccataaccatcgccgctacccaataataaaaacaggagcgctacatgattaagcccactttcaacattcctactgtcgagcattaaaacctctcggttcccgaagggtttacttctgggtggtgcaagccacctcaataactcaaatgaccagtggtcagagtggaaggtgtttatgtctcgagttttccctgtgacggccccgacagtcagcttcggcgagccgggtacgaccgcaaccaccagcgccaccaaaattgccaagcgcgcagccatcgccgccgccacgggcacggcggtggagtattacgagttcggtgtgtacggctttatggcaacgatcatcgcgccactgttcttccccagtgacaacgctgcagctgccttgctggccacgctggcggtgtttggcagtgcgtttttgatccggcccctgggcggtatcttgctcgggcgcctggcggaccgcatcggccggcgcaatgtgttgttgagcacggtgatcggcatgggcacggcgacggcggcgatcgggttgctgccgacctcggcccaggtggggattgtcgcgccgattctgctggtgctgatccgcctggcccagggcttttttgccggaggcgaagtgatcggcgcggcggccttcctggccgagtcctcgcctaaaggccggcgcggcttttatggcgcgtttaccccggtcggcgtggccattggcggttcgatggcggcgattatctgcgggattaccaccgggctggtcgacgccgagcaactgcaagcctgggcgtggcgcatcccgttttttctcgcgatccccttggtgattttctcctgcgtgatgcgccacaacgtcgaagaaacgcctgagttcaaagcctttcttgcagtggaaaagccgcccacggccccggtcaaggaagtgctcacgcgcaacctgcctgcggtgctgcgcgtcgtggtgttcgcctttgcgcagaacgccggttattacatcggcctggtgttcatgaacatttacctcaccacttacctgcactttgagaaggccaaaatctactgggtgatcgccggcatcagcctgtgcatggcggcgatgatgccgttctggggcgggctgtccgatcgcatcgggcgcaagaaggcgttgaccatcggctttgtcggctacgccgtgctggtgattccgatgatggtgctgatgaacaacagcagcctgttgattgcggtcatcgcgtttttcgtggcgacgttgccgatgccggtgattcagtctgtggggtatcccacttatgcggagcagtttccgactcgtgtgcgttacacgggcatggccatcagcatcaacctgggggcgatcctgggcggtggtatcacgccttacatcgtcacttcgttgatcggctcgaccggcaacttgctggtgccggggttcttcatggccggggcggcggtgtgtgcattggtggccttgaccacactgcgggagacctcgcagggcgaactcaaacgctgaagcgaagatgtccgaatccgtcctcaagtggtccgtggcggggctgtcggcttttggggggcgttcttagtatggcttgcatcaaccatcacgttgcaagccacgaggacacaccatgagccgcaaagccctgatcgttatcgatgcccagcactcgttccgccattcaacctactggtccgaaaatgacctgccgggctacctggaaaaacagcaagccctgatcgatgggtgtgttcaacaaggcatcccggtggtacaagttttccatgttgaagagcagggacatttttccatggcatcgggcaacgtcagggcattgagcgagctgtcgatcaaccccgacttgatcattcacaagcgttaccacagcgcctttgccggtacgccgctggcggcacgccttacgcagatgggcgtcacctcgctgatcatcagcggcatccgcacggagcagtgctgcgaaaccaccacccgccatggctcggacagcggtttcagcgtggattttgtcagcgaagccacgctgaccttcccgatgacccatgtgcgcagcggccgcgtgtacaccccggcgcaaatccgcgagcgcaccgagctggttctggaagaccgctttgcgcgcatcgtcaccgtcgcccaggcgctggagagttaaacccatgagcgtgccggtgctgttcgtgctgctgcccaacgtgctgatgctggacctggcgggcccggctgaagtgctgcgcctggccgcgcaaatcgatgacccggccgccgtcgatttcgacttgcagtatgtcagcccggtggcggcgctgcacacctccatcggcttgccgctcagcggcctggcgccactgccgcagcgcctggcacctggcacgtgggtggtattggtggggtccacgttgaaggtgacgaaagcgcaccggcaggcttttgacgccgccagcaatacgctggtgcagtggttgcaaaccgtcttcgcgccgtcgggtgaacggctggtgtgcgtgtgtgccggggcgttgacggcagcgcgggccggcttgctcgacggccgccagtgcaccacgcaccatgcgctgtgcgaggcattgcaggtcatggcgcccaaggcgcgggtgctggaaaaccgcctgtacgtcaccgacggtccggtcagttgcagtgccggggtcaccgccggtatcgacttgatgctgcacctggtggccgagctggccgggccaaggctggccagcgcggtggcccgtgacatggtggtgtacctgcgccgcagcggtgccgatccgcaattgtcgccgtggacgtgggggcgcaatcatctgcacccggccgtgcaccgcgtgcaggatgccgttgccgctgcgccgtgcgaggcctggagcgtcacgcgcatggctgaactggcctgcaccagcagccgccacctggcgcggttattccatgagcatgtcggtgtcagcccactggattacctgcaccggctgcgcctggcggtagcccgtgaattactggccgagtcgagcctggatatggagtcggttgccgaacgcgcgggctttgggtcggcgcgtcatttgcggcgtatctggggcaaatatgaagcgggcacgccttcagctgggcgtgtcagcggtttcggttgaggtttggggggcttcggcttccagcttcaagcggtcggccttgctgatgtagcggtccttgcttttgggcgctaatttggcactggcctttttcgctttggccttgaagagctgctgcaatttcttttggcggttcatgatgggtggctactcaacggttaatggttggaatgatatcagcgtcagtcccggcgttgtggagtcgatacatgcttaagctcagtgcctgccttgccagccttgccctcttctcgatgcaatcaatggcccaggccggcgacacgttctacatcaaccccggatcgaccgctgcacagtgggtcaagcaaaaccccgacgcgcctgacaccgcgaaaatccgcacagccattgccaatgtgcccggcgccctgtggttgaccggcaccagccaaggcaccgaccaactggaggcgcgcgtgacccattacgtatccgctgccgccggcacccacgccacgccgatactggtcgcctacaacctgccgcatcgcgattgcagcggtggcgcctcagcgggaggcgcaccgaacgcggcggcctatcgcgtctggatcgatcatgtggtcaacggcgtcggcggcaacccggccgtgatcgttcttgagccggacgcattacccgacctgcaatgcctcagccaggctgaccgcgacgagcgcctgtcgttgttcaattacgcagtgtcaggtttcaaactgcgtgcgccgcaagccagggtttacctcgacgccggcaacgccggctggaagcccgcagcctcgatggcggaggccctgcacgcggccggcgtgaaagacgcgcgcggttttgccctgaacatctccaatttctacaccctcgaccaatcgcggcagtacgcggacctcatcaataaaaagctgtcggcggaccatgcatacaccaaggctgtggtggtcgataccagccgcaacggcaacggcgcccaccccggcgattggtgcaacccgccggggcgcaagctgggcctgttgccgcaaacgctgtcgccgaaccttctggcgctgtggatcaaacagccgggcaactcggacggcgcctcttcagccaccgccgactgccacggtgggccggccgccggtacgttcagtgctgagctggcggttcggttgatcgaaggccagtagatgcgcggtacctactcggtctcaaccgtgttgaccaacgcggtgcgagagagagcggcactgcgaaaatgcatcggggatttcccggtaacgcgtttgaaggcattgctgaaagcgccttccgacgtatagcccagttcacgtccgatatcgccgacctgcgccttgttctcgcgcagggcccgttctgccaggcgcatgcgccaatgcgtgaggtaggtcatgggcgcgacgcccgcgacagtcttgaaatacagcgcaaacgtcgcgcgggacatggccgccgctttcgccaactcttcgagccgccaaggccggccagggtcaccgtgtatcaggcgcaaggcggggttgacgcgtttgtcggtcgccacccttagccagcccgccgccatgggttcagccgtgtcgaaatgggcgcgcagggtatggataaacatcagatgggcgagctggactgaagcggccccggcgcctggcgagtcgtcccgggcttcctcgatcaattgctgcatcagccacgccaatgtgcgggcgtggcgcgaaccgttctggacgtgaatgaacgggggaatggcgtcgagcaacagccgagggtagtcggcgctccattccacactggcgatgatgagctggcaatcgtcaccgatgccgtggtgggcggtggtgccggagcgatgtttcaacacctcggccagctccacgcgaggcgcactgaggtcgctggccatgaccagcgcgcgggaagccgaagacaaaaatacatcgccttcctgcagatggaagggcgccgcttcgccctcgaatgcgagccagcaactgccgcgcgcgacgccccagaacttgatggtgtccggcggcggaatggcgatcgcccacgcgccgcccgccaccagggcgccggacatgacgcagcgggtgttgacgagttgcaggaagcttgagagcgggtcgttttgcatgctcagacgattgcgtaaaaaaggcagagtttcaagtattaaaaatcttgttcgctggcgctattttgacaatgcaccgcccactcttccttgaaaggttttcaaatgactcagcgcacttggttcatcaccggcgttaacagcggtttcggccgccatatgaccgagcaattgctcgcccgcggcgatcgcgtcgccggcaccacccgcaagcttgaggctctggacgatctcaaggctcactacggtgaccacctgtggctcgaccgcctggacatgaccgacacggcagggatccagcgcgtggtgcgccaggcgtttgccgacctcggcaggattgatgtgatcgtcagcaacgccggttacggtttgtttggtgcggcggaagagttcagcgacgcgcaagtcgaccaccagattgccaccaacctgctgggcccaatcacgctggtgcgcgccgccttgccacacctgcgtgcccaggggggcgggcggatcattggcctgtccacggtcggcggccaggcggtgcttccgggcgggtcgctgtaccatgcgagcaagtggggcctggaagggtttctggatgcgctgtccatcgagcttgcgcccttcaatatcggcgtgtcgattatcgaacccggcagcgcccgcacccattttcgctacgtcaacgcgcagctcggcgaaccgctggaggcctacaaaggcacaccggccgggatggtgcacgggttgttcaaagacacctcgcgcctgccgctgggtgacccggccaaaatgtctgccaccatcattgccagtgtcgaccaggtgccggcacccaagcggattgtgctgggcagtgattgctgggggctcatcaccaaggcgttgaccgagcgcctggcggcggtggaggcacagaaggaatcggcgagcttgtcggatttcccaccgggtgcttaaggcgcattcccgaatagaataaatgctattcccccggctcctctaccgtgggaaacccccatggacaatgcttgttcaacggttcacctggccgcccctgcggcggccaacggtgcccttgaatcatccagtcggcattgttctacaggtagcgttatgaacggcaagcgagtgacacgagagcaagtacttcacgccagcaagggcatgctgcagaaacagttctatgcggtcttttccacgcccgccaacggcattgaagccgtcatggaaaacctgcacgaacaccttgagcatcaatgcaggatcgaacgcgacggtatcctcgttgcggccggcccgcactggagtgacgacgagcagtactgggacggcgacggcctgttcatcatccgcgccacctcgattgaacacgccaaaagcattgccgcgcaggaccccatgcacaggtgcggcgcgcgcacattttccgttcgcccctggctggtcaatgaagggcgactgaacctcagcattgaattttcaaccgggaagttcaccttgagctaagcgtgcccggcgaaacacccccactccttcgtaacttcaggaattgaacatgactcttcaagccaaacttgatgcctttaatgctgacttcgtagcaggcaaaccgccttacaacgcaccgccgcaagttcacgtcatcatgaagcgcgcgaccgccgagctgattgccagcggccaggctgaacgcgcgttgaaagtcggcgacaaggcccccgaattcaccctcaacgaccccgatggcaagccggtttcctccgtggaattgctggccaagggcccgctgatcatcacgttttaccggggtgtgtggtgcccttactgcaacatggaattgcaagcgctggaaaccgcgttgccgggtttccgtgaactgggggccaacctggtggccatctcaccgcagaacaacgtcaacagccgtaaatcggtgcgcgagaatcacctgagcttcccgattctgtccgacaccctgagcgacgtggcggctgcgttcggcctgcgtttcacactgccggactacctggtggacctgtacaaatccttcggcaacgacctgccggccttcaacaacaacccggcctgggagctgccgatgccggcccgttatgtgatcggccaagacggcgtgatcacttacgccgaagtcaacccggactacacccagcgcccggatccttcggagttgctgccggcgctgcgcggttaagcaacgcgctcttgtggtgagcaggcaagcctgctcaccacaacaaactccaaggatattttgattcacacccggatgttttccagcaactgctccacatagtcgacaaatgcacgggccttggcgctggccatgcgcccggtcggaaagatcgcccacaggtccagctccggcagttcccaatcctgcaaaaccgccaccacctcgccgctcaccaattcaggcccgaacacccattccgacgagaccgtgaggctgtagtccgacaacacggcggtgcgtacgccctcggcggcactcatgcgtatacggccgctcaaggtgacctgctgctcaacgtcgtctttcttgaacacccatgaagcccccccggcaccgatcatgtagatcaccgcttcgtaaccggccaggtctgcgggtgattgcggtatgccgtagcgtgccaggtaagccggtgttgcgatcacccggcgccggcatttgccgatctttctggccgtgaaattcgaatcgctgaggtggcccatgcgcagggccacatcggtgccttcctcgataaggttcatcgaccggtcgtcgaggcgcacgtccacgtccagcaaggggtgcctgtcgaggaaaccgcccaggtagggaaggatgtacaacctggcaaacgtcactgtggtggagacccgcaacgtgcccgccagcccggtagccgccccgcgcgcaagccgttcggcttcgttggcgttctcgatgacggttttggcctgctcaaaaaacagcaggccggcctcggtgggcgacaggccgcgcgtggagcgactgagcaggcgaacaccgaggtgctcttcaagctgcgcgatgttttttgagacagcaggctgcccgacgttcaagcgccgggccgctgcagaaaaagaacctgtctctaccacgtagacaaaggtttccatcgccgccagccgatccattttattccccgttggaatgactcatatcactgcgagcagtctgccggtaatgcggtgggccgtgcaaaatttttctgtcggttatcaaccccggaaataacaacatgtctttcacccacccaaggtattcactcgtgctgcaagttctcgccttcgccacacccaacagcttgaaagtgcccatcgctctggaagagttggggctggaatatgaattgaaagcggtcaatgttcgtcagggccaacaaaaatctgccgatttcctggcgctcaacccgaacggccgggtgccggtactgatcgaccccgagggcgctggcggccagtcgctggtgttgacggagtcggcggccattctggtttacctggcggaaaaacatggccgcctgctgccgcagaccgttgaagcacgggtacgtgtgttcgagcagttgttcttccacgcttcgaccctggggcctgccttcggccacgcgggttttttcctcaagcacgccacggccgccatgccgattgccatcgcgcgtttccacaacgaagccttgcgcacgctcggcctgctggaggccttgctggcacggaacgagttcgtggcgggcgatcagttttccatcgccgacatcgcgcatttcggctggatgtggcgtaaagaatttgccgaggtggatttttccgcgtcacctaacgttcagcgctggtatgacgcgctgtctgcacggcctgcggtgatacgggcgatcaagcgtgtggaggcattgattcccgacgcgtgagcctgcggccgcgtcagggtgtacgccggcccgccaaggcgaccccgagccagtacaacaaccccccggcgatgacgaacagggccagcacgtagaacatggtgtgggccggctgtgtggccaagacgaccccgcacagcaccggccccaacgctgcgccgaccgtgctcaggttttgcgccgcgtaatacatgccgcgcaagggattgggcgcgatgttgtcgatgaacatgtattcggcgggaaacacgatgatttcgccgacggtgaacaccgccatcgacagcacccagcacaccagcgttgtggacagggcaaaaccgccgaggcccaggatgaacatcgccaggccgccggcaagccacaggtgcagatgtgcaggggtaatccgtttgccgaggctgtactgcaagccgatcaccatcagggcgtttgtcgcaacgacagtgctgatgatttcgtacgccgcccgcggcgtagtggtgacaatcaggtactgcgagaggtacgccgtgaactggccgaacaccacggcgctgagcacaccgcccaaggtaaaacacaccagccggtcatcgcgcagcagcactttgccaaccgccagaaagggcgttttcgggccggtttcaccgactgccaggcctgtgtcgccccacacgaaatagacaaaaaagaacccggcgcccagcccggccgacatcaaaaacggcaggctcacgtccaggccggccaaccctgcgcccagaaacgggccaacggcataaccgatgttggtcagcgtgtacttgatcgagaacacttcactgcgcccattgacgggcaccaggctggcaaaggcggacttcacggcgatatcgatcacggcataggccaggttgaccgacaccaggcacaggtaaaacagccacagttcgggggcgacaaatgccccgagaaagcctgcggtgaacacgctgcagaaggtcaggatcagccggtaactcgacaggttgtccaccaggaaaccgccatacaggctcagcaaagagccgatgatcagcgtgctgccgatcaccaggccgatatcggcaatgctcaagccaaagttgcccgacaaataaatcaccagatagggcagggtgatcgcgcgagccagggtcaataccagtgacgcagacagcagcagattgagggttgaagagtaattcctgagcgtggccagcatccgtgcctcatcgtcggctttttaaagttcgggcagcttactgttgacggcatttctgatttaggatgttttttatcgaaacgctggaactgaattcatcaatcaaggacgtgcatgttttcctccgaacgcttgaagggcatcgatgtatttgtgtgcgtcgcgcaactgggtcgcttcacggcggccgccgagaaactgagcctcacgggttccgccatcagtaaaagcgtggcgcgcctggaaaaacgcctgggggttcaactgttccaacgcactacacgcaaactggcgctgacggatgcgggtgtcgcttttttgcgcacctgcaccgccgtgctggccgacctggaagaggccgagctgtcactgcagagcgaaaacaccgaactgcgtgggcgcgtgcgcatcgatttgcccggcgcctatggccgcgcacaggtgttaccggtgctgctgtcattcgccaacgctcacccttcgctccagccgcacatcaccttcagcgacggttacatcgacccgctcaaggaagacgtggacattgtcgtgcgtatcggccacgccgacgcctggcccgagacggtcgggcatcgcctgctcgcacgggaatggcacctcttctgtgcctcgccggactatctggcgcgccatggcgtgcccctgtccgaacatgacttggagcggcatcagtgcattgcctacggctggctggacggccgggtcagcccttggcgccatgtggatgaaaacggcgcgacgtggcgccggccagtcacgccgcagctggtcgtgggcaatggcgaggggctggtgatggccgcagaagccggcttcgggattgtgcagttgccgtcttggctggtgcagcgacagttggagcagggaaggttggtggaagtgcttcctcagttggcattacacggggcggacatcaacgtaggctgggtcaaaagccgcgaggcgctgccgaaggttcgaatggtggtggaggctttggttggcgggttgaagggttgatcacccgggtttgccccgacagccgccgacctcaaggccggccactgtctgatcaaaccacaggcattgcggcttagtcttcgccgttggtaaacgcgtcgcccgcgacgtggtagaccgtcggttctgccgaaagatacggctcaagccccgtcatgaagcgttgatggtcatcactggcttcgaagcccggggtgtggtcttcaagggagtgccactggacgatcaggttgaagtgctcgggggtttcgatgccttgcgcgagcaggtggccgagatagccctttgcgcggcaaagcaaaggggcgacctctgtgaacgcacgtctgaacgtttcgacgtgttccttgtgaaccgggagcagggcgatttcatagatcatggcttttctccgtgatggcttgtgcgggtaattgcgcgatgagtgatggttcgacggcgattgctatttttccttgaaggccattattgcggccctccagccttgcatgggcgagggccacgtccgccagcgaatacaccgcgccaacgtgtggccgcagctgaccgcgctcgaccagtgtgctcagctcatccagcttgccgcggttctggcgcgtgaaaacgaagtgataactcgcattctttccccacgcctgaacgaggttttgcggttgggcaatgtccacaatggtcactacacggccgagttgcgcgagtacctcggggctgcgtgacaagctgttgccaccgatggtgtcgaacactacgtcgacgccaaagccatccgttttccgcatgacggcgtcgacgtaatcttctttttcataatcgatgaccacatcggcgcccatgctgcgtgcgaactcaacgttcgcttcgcgtacggtggtgaacaccctggcgccgatggcatttgccaactgaatcgccacatgcccgacgccacccccgccgccgtgcaccaggatgctttctcccacgcgcagtgccgcccgcaccaccagcgcttcccacgccgtcccgccgacaaggctcaggctcgccgcttcgaggtgagtaagcgaggcgggcttgctggcgataatgctttcggcggccacgtggtattcggcatagctgcccggcccgtcaaagatttgcggggtgtaccaaacttcgtcgcccggcgcgaaggccgtcacccccggcccgacggcttcgaccacgccggagacatcgtgcccggtgatggcaggcagttgtacaaggtcggggtagtcgccacggcgcacctgataatccagcggattgatcgaggtggcatgtacccgcaccagcacctgccccgcgagcggcacgggcttgggtacctcgcgaagatcgaacgattgcgcgccgccaaatgagtgaagtatcaatgccttcatgatttatcctgatttcgagataatgggatatcgagaaatatcgatatattgtggtaaaaaaacctacaagtccgtgccaatgacctccgccagggcgctgatggtctcttcattacgcttgtagtacgtccactgaccaatacgccggacctcgaccaggcccgcgcgttgcaacgtcgccagataacccgacaccgtagactgcgacaacccgatcccttcctgaatactgctgacgcagacgcccaccgtgtgaacgtcaccttcgtcttgcgcagggaaattcttttcggggtctttcaggcctttcaggatttccagacgggtctggtttgagagggctttgaatatttcgagtaggtccatggcgggagaatatcgagattattagatatgtcaatgtgtaaatcataagggcgcaagccacggctcgctttcttcacgcgggcctgcaaaacggcgttgcgaaggtgacaagcggtatgtgatcgggcacgatattgaatagtgtccatttgctatctagcattcataaagggaagcctgcgctcgcaggcagtaaaggaggatagtcgtgaaccggctctggattgaccttgaatcatatctacgcaggcataacccacagcttctcgctgacttgaaccctcccgcgtctcataaccaaatcaaggatctggaggctcagttgggtgtgacactgcccagcgacttcgtgcagtgcctgatgcttcacgacggacaattgggtaacgcagaagggttatttgacgggtatgagtttctttcggcgcgcaaaattttcctggaatggtcggcaatcagccgtctcctcgagcggggtgatctggatgagccgttgggcaaaccggaccccgccgtaagtcatgcctggtgggacacacagtggatcccgttcgctgccaatggcgctggtgacaatctttgtatcgacctcgctccggcagccgccggaaccgtcggccaagtcatcagctactcccatgagttccctcgacggtcggtaaaagcgccaagtttttccgtatttttcggtgctctagccaatcgtatgcatgcctgaggcccccatgacaatgacgcttattcaaatgcgcgagcagcgcctgcaaaaacttttcagtgattgtcaacaacaggtcatagggcagattatcggaccattcgggctgtccactgcaatgttcgaggacaaggacggcggcaacgttaccaccctgcacaatttttcccgggacgataaccagtacgttgcgacggagtcggacaaagctttgcatgagcattcaaagaccgcttatgacgaagatgtccgtgcccgatatgaaattaacacccagaaaaaggccgacgctgccggcggtgaaacgtggggtgaaaaacgtgcagaacggattgccagggggcaggacgactacaccggcgcgccagtgtcctctgacggcacgacaaagatgcgccggggcgagacggtcacagtcgagctggaccatgttgtatccatcaaaaaaactcacgataccgccaagaaccatcttgcgctgggtgatgtggtggtcgattcaaccacgggcgaaacccgtgttgatgccgggcggatgcgcaagttggtcaacgatgatgacaacctcgcactaaccaataagcccgccaacggttctaaaaaggcgcatgacctcaaggaatgggcgaaccgcaagcgcgacgacggcaccaccaacattgatgagtttgggctcgacgcagacttggtcgatgcggcttaccaaaaagctcgcgcccatgctgaccatacggccgataaggctctgctcaagaaacaagcgggcgagcttttcacgaccggcggccaacaggccgtaatgatgggcctgcgacagtcgctgggtgtgctattgactgagttggtcaatggcttgttcaacgaatttaaagtattgatcaaggcaggggtgagtgccggtaaatccttattcgaggagattaaggatcgcctgcagcgggtcattgcgtcggtgatcaagaaagtgccgaacgctgcctcccaggcactgcaaggtggcgttagcgggttcatgagcaatctgatcacatttctgatcaacaatttcctctccaccgccaagcgttttgtcacgattattcgtgatggtctgctgggtttggtcaaggcgatgaagatgatcatgttcccacccaaaggcatgacatcggaccagtctctccaggagggcctgaagatcctcacagcagtagtggtcacgagtgtgggattcctgttgcaagaaagcgtggcgacttttctgaagacgctgcccttccttctaccggtcgctgatatggtcgcgggtgtactgatcggcatgctgaccggtttgctcagtgcctttttggcctatcaactggacagcctcttcgagcgctaccgctacgcgtatgacgagaagctgctggactcgatcatcatcgatgggcgcttggccgaacggctggccggggacctgcttgtgcaggctgatctttcgttgcaatcgatgggtaaatacgctgacgccatcagtaactacgaggtcattgagaactcgttgaacgacgcatgccaagcctctcagggaaccctgttcagtcttgctgcgagtatcgagacggccaagacgcaagtcagtgaaacgcgccagatggtcgcgtatctcgatgacacccaagcactgttggatgatttttttcaaggcaaggtaatgcaatgagcagtttgaaaggcaaggaaatccagatcgttaccgcgttgtctcaagccgatctgccggagtcagtcatcggtggcagttgcgtcaagcaattgattactgcagtggtcgatgcgcaaagtcaggccaagagcgccaacgatgtattgcaaaaggcgcgtagcgaaaaagactctcaaaatgtcttgagcaactggtggaacaataccgaggataaaatcaaggatgcgcagctcagcctgaccaccgagatatccaacctcaatcggcactcatcacagttgctgattttcaacactgcagtttcaaaagtgctctgtgatcagcaagatatcctgttgagtcagcagcaacggctcgaagcgcaggcgatgacgttgcgggcgcagaacacgcagatcctggagcagcaacaacagctggctgcccagcaggaggagatacgcgcagctaaccaggggctgcttgaagccaaaggcctgacggccactcaggcgcgcgacctggttggttgcgtgcgtcgcgtcgaagcggccgaagcgcgtattgttcaggtcaaccaagaggtgctggcagcgataggtcaacaactcgaccaagtccgcaaggatgtcgccgactctctagcaaccgccgtcagcacgctggaagcgcgcgacaagcatttgctgcgtattgcacaggaccagcaacaaaagctgagcaaccatagcgacgttattgacggcaaactcaacgcattcaatcaggcactgccagggcagctcgaaagctcaatcagcaagcatctggagcctagcctcgagatgttccgtgcgatggagcggcgggtggatcagcaatccgccgagcatgcccgtctggccaagcgcttgcgggtcagttgggttgtcgtcggcatcgccctggtggcagtgggcgtagcggcggtgatgatctgatacccgtttgcacttactcataaagccagggtttcagctcatccagatttttaactacgatctgctgtgctgacgccttgggctcgagttttttcgggtcgatctgatagcgctgtaaaacataacccaccagggcgcagcgtgtcgggatcaccagtttcccctcttccataccgaggtcgacttcgatgattgccttctgggaaggtttcaggcgcgaatccggctcgatgatgatatcgaccatggtgttccactctgtgtcgctgttgatcaggtttttgcttatgcgttcgaactctggttcgccccggaacctgctcagaacgaagtctcggtacttgcggttcttctcgcagtaagcccgcacgtgccagcgcataccggaatagatcaaggtatgaggcgaaatcagccgcgtttccggaaccggattggctagcgaaacatactcgatggaaatcacctcaccattgcggcaggctctgagcaggggccgcaatacatccgggcggatcgtacgatctggcacctccagcaccatggtgtgggcataagccaaggccagcccctcgacatggggggcccgtaaatgggtctggttcagcaattgcagataggcattggcgctgtcatcaatgaatagcggcttaaagcccttaacgggtatgtaccccttccgttgcttgtcatatgtaagatttttaggcgcatgctcgttgatgtatgtgttgatgtcctttgacgcctgctgacggctaatgccgaagctctgcatcagatgaccagtggtcagacggccctcccaccaggcaacggtttcgatcaaacggtagcgaagtgccaggtcccagcgcacctggttgatttcctgtgttcgtttcatggcccgtccatgtgcgtgaattgtttacctgtacaagtctacaatctatacgtgtaaaaaatcactacatatcatttgcgtgtcttcataacgaactgacttcacgaaaggattacaaatgactacgacggatgtgatcgcgacagctgcgcttctgatgatggtgctggttgctgtgctattgcttgcccagtacctcaagttgcaggaggtttggggcatgatagttaactgccgggcttccctgcgctgggcgcgcatccgggaatgggaaaacaaggagcttcgttctgccttgcgtgcgcagaaggcgcatgtcgatcagttacagaggaaggtgagtgtgctggaggagttggtgccgtgagggacgtcgtgcagcgccactgcacttgaacttgaaggtgatgtcgctgggttggaatgtgctgaatcatcccctgatatcggtaggcactcgctgatcacttggccggaagcagccttcaggttttgctccgcagggccgcagtggcttgcaggccgtaaggaacagtgccagtaacagccaatataatcccaaatgctaactggcaatggtccaagcggacccttgccggttttaaaccaaggacctaccaagtgatacctgtataaaaaccccattaaagtgatctgtgccaatggaggctagcgttccagctcatccgttaaggcacgtgagtgtctacgagggatcataagcgggcgaaggtccgcttcttcaaccctttaccccaaccccccccgcaacctcctcagccactgccacaaatacccgcgccgccgcagactgataaccccctttacggcgcatcagcactgccgttctttgcaaccgttgcggccccaattcaatcgcgaccaactccgggtgcgcccgcgcaatcgctgctggcaacaccgtcgaaagccccgtcctgcgcaccacctcaagcagtgcgccgatcacattggcttccatcaccacattcgggcggatgccgtgttgccggcagtaccgatcaatctgctcgcgggtggcaaactcggcactcagcagaatcagggattcgttgttcaatgcctccaagccaatgacgcgctccgccgccagcggatgctgacgcccgaccaccagcgccagggtttccatcagcaagggcagggcgtcgatgtcttgcgcgtgtacctgatcaaacgcgattcccacctccaactcatcggccagcagttgctgttccatctgttcctgggccacttcccgcacggtcaaggtgatgttcgggtagcggcggtgaaaggcttccaccagcggcccgacgaggtaggtggtgaaggtcggcgtcactgcaatccgtaaagtgccgcggctgaggtcgcctacatcatggatcgcacgcttgccttgctgcagttcctgcgccgcacgcagggcatggcgcaggtaaacctcacccgcgtcagtcaggcgcgtcttgcgccctgagcggtcgaatagctgcgcaccgaggctttcctccagttgccggacttgctgcgacagggccggttgcgagacgtgcaacgccgccgccgctttggtgaaaccttcatgttgcgccacggcaaggaagtactggaggtgtcgtgcgagcatggctttacccataagattatcgaatgtggttgatcacatatcagacttttaccttatttcatgggctgcgtaacctttgctccatcgcatcgcggttcaaaggagtcacccatgaaagacatcatcgacggtttcctgaaatttcagcgcaacgctttccctgaacgcgcaggcctgttcaaagacctcgccaatcagcagagcccgcgcgcgctgttcatctcttgttccgacagccgcctggtgccggaactggtgacccagcgcgagcccggcgacctgtttgtgatccgcaacgcgggcaatatcgtaccgtcctacggcccggagccgggcggggtgtcggcctcggtggagtacgccgtcgcagccttgcaggtcagcgatatcgtgatctgcgggcattcggactgcggcgcgatgacggccatcgccacctgcaaatgcctcgaccacatgcccgccgtggccggttggctgcgctatgcggactcgggccgggtggtgaacgaggcccgccagcacccggacccgcaggccaaagtcgcttcgatggtgcgtgaaaatgtcatcgcgcaattggccaatattcaaacccacccctcggtgcgccttgcccttgaagaaaagcgcgtgacgctgcacggctgggtctacgacattgaaagcggctgcatccaggcggttgatggtcgcaccggcaagtttgtatccctcgccgacaaccctgatgtacgcgccgtttcgcattaacccggcgctcctgttgtcgcaccgcagttcccctgtgggagctgtcgagctttagcgaggctgcgaaggcggcagggcaggcgatattttttcagccatgccgctgccatcgcaggcaagccagctcccacctttgagctttatcgctggcgggaaggtgttcgtcagtggcgatttttgaaacaccacagttcccctgtgggagctgtcgagcttcagcgaggctgcgaaggctgcagggcaggcgacatctttttcagccgtgccgccgccatcgctggcgggacggtgttcggcagtgacgatttttgaaacaccgcagttcccctgtgggagctgtcgagctttagcgaggctgcgaaggcggcgggccaggcgacatctttttcaacagtgccgccagccagccctcacctttgatcgtcggtgccttgctgatggtggtcactcaatcgatcagttacagctgttttacttccagttttttacccacggagataaccccatgatccagtcgcaaatcaatcaaaactcccgcttggccctgaccgacgtcatcctgctggccaaggctcgcaaagacttgtcatttgcccaagtcgccgaaggcaccggcctgtctgaggcctttgttactgccgccttgctcggccaacacccattgccggccagcgccgcccaggccgttgccgacaccctgggcctggacgcggacgcagtggccctgctgcaaaccatcccgttgcgcggcagcctcggcaacggcattccgaccgacccgacgatctaccggttctacgaaatgattcaggtctacggcaccacgctcaaggcgctggttcacgagaagttcggcgacggcatcatcagcgcgatcaacttcaagctggaggtcaaaaaggtcgatgacccggacggtggttcgcgcgcggtcatcaccctggatggcaagtatttgccgaccaaaccgttctgattgcacggcaagaggcccggcgccgcaaggcggccgggtcacgtgcgtttggaagggggattcggttggttttccaaagcggtttttttgcgtaagcctgaactactgcttcgccaaaaacgccgtaatcagctcgatcacctgctggtgaatcaccgcacgtggccgagccccttcgccatcccggcagatcatgccatcccccggcgaaccctcttcaatcaacgcaatcgctcccggcttgcagatcgacataaagctgaaatggttggcgtcgctgatatccacgtaggttgtcgacgctttgggcagccgcttggccaagtcggcggattccagttcggcaggcatatcctccgagggcgcaccgccggcaatgaccagcgccggaaccggcagtttggccaggctggcgtcggtgaagccacgtgacaggcccaggtccaacggcacaatggcggtgacgcgcttgtcgctcaagtcagaggccagatgggccttcagggccggtgtgccggcagggttcatctcatggtaggcgatgcaaccgcccaatttcgggtgcacggtgcagtcgcggctgaacaggtcggggtcgaagcgggcgccggcgatttccagcgaggtccagccgccgagggaatggccgatgacggcaattctgtggttttcgaccgcgccaaattgtttgggctgtgccagcactgcgtcaatcgcgcggctcaggtcggcggggcgcttccacacctgtgcggcggctggcgggttgcggtctttcgtcgtggtgcccgggtggttgaccgccgccacgatgtagcccttgtgcgccaacgcgctggccagccacacctgtttaccccagttgccgccgtaaccgtgggagagcacgaccaagggatgcgcgccagcggctggcggtgcgtctggaacgccaggggctccgacgaagaccacggtgtcggcgatcaattcaggtttggcggtggttgtggcggggtaccaaaccaccagttccagtgggttgttgttttgcgcatcgtgaagggtggtggtgcgaaaacccacggggctttcttcggcgagtacaggggtggccaggcacagcagaaacagggcggtgagggtgtttttcacagttgttatcgtccttgattttttgtcggcgcatcatgccctgaagtctgaggcgcgcgcatccccccctgtgcacaaaaagtagctgctgcgaatgggcgcaattgactatggttaagcaactgcccattacatacacacaaccgcaaaaggaccaacgccatgcgatacaccctgttcgagcgccaacgcgacctgatcatcctgctggcccgtatcctgctgatgctgctgttcgtgacctccggctggggcaaactcaccgggttcagcggcaccgtcggctacttcacctccattggtgcaccgctgccgtccatcgccgcgtcggtggccgtggtcatggaattcggtgtaggcattttgctgctgatcggtttttatacgcggccactggcgctgttgatgagcctgtttgtactggggacagcggttatcggccaccacttctgggacatggtcgaaccggccaggtcggccaacaccattcagtttttcaagaacatgagcatcatcggcgggcttttgctgctgagcgtgaccggggccgggcgctactcgcttgaccggcgataagcgcggctgagcgcccgatgcgcaggcatcgggcgccacgctcgccaacgggcggattacagcgcgaaaatggcctcgatttcgatattcagttccggggaaaacaatttggagacttccaccaaagagctggccggcaggttcccggcatagtgatgcaccagcacttggcgcagctcacccacctggctgaagtcggtaatgaatacggtgactttcaagagtgcggacatgtcggtgccttcttcagcagccaccgtttttatctgctccaggatggcattggcctgtttatccatgctctggccctgggcttgcgtgccaaaggcggtgaagcctgacaggtagagcgtgttgccgtttttcaccgcgtgggaataagggccgacggcaggaggaagggcggcgtaagttttgcgttcgacaggcgtgcttggcatggtgtcttccagattttcgagtgagtggtgagtcaggttcggttcacgttatccatgttcccaaaggcgcccggcctgctgtagtcacgttcctccacggttactgcctgattctctctgtgttgaatcagctcatattccaggcgttcttccctgtgccataatttttttgggcgctctgtcgataccctttctggcgatggtaatgccgcgccggaggtcattgtctgtgaagaactatagagtttcatttgaagacggctgcctggcgctcagggaacgcctacttgcgctgcttcccgaggcgggccgtttcgccacgccaatcgaagggtttgcgctccatcgttatgaccagtgcgacacggcaacaccgcatttatacaacccgatattgatcatagcggtgcagggcaaaaagtgggttcgcatcggcattcgggacatttcattcggtgagcgcacgtgcttcatcgcgggggtgaacatgcccgtcaccagttgccttgtgcaagccacgccgcaaatgccctacctgtcgatgtccctggacctggacagaaacctgatggccacattggccgccaaaatcccgcaacccattgaatacagcgcccaggcggctatcggcgccgccgtgcaagacctcagcccggaactgctcgacgcctttttgcgcatgcttgagctgctggataaacccgatgaggcaaaggcgttgggcgcgctgatctatcaggaaatccactaccgcttgctggccacaccgttcgggcagcaactgcgccagttaaatacggcaggctctcaaagccataaaattgaccaggcgattctctggctgcgcgagcattaccgggaaaccttgcaggtcgataaactggccgcgcggttgaatatggcgtcttcaacgctctacaaacacttcaaggacgtgacgacgctcagcccgctgcaatatcaaaagcgtttgcgcctggatgaagctcagcgactgatgctggttgaacaccgtgatgtcaatcaagcggctttaagcgtcgggtatgaaagtgccaaccagtttggccgggaatacaagcggctgtttggcgagccaccgcggcagaatgtggtgaacatcaaggcgggcaggcagtgaaagcaatcttggccggcccaccttggtatccgccaacccgtccccataactactccggtatccactgaggtgaccgaccatgaccaacccgaccgaaaccgccatcctcgccggcggctgcttctggggcatgcaagacctgttgcgccgctaccccggcgtgctgcacacgcgcgtcggctacaccggcggcgacgtgccgaatgccacctatcgcaaccacggcaaccacgccgaagcgattgaaatcgagtttgacccggccgtgattacgtaccggcagattctcgaattcttcttccagatccacgaccccagcacgcccaaccgccaaggcaacgaccgtgggccgagctaccgttcggcgatttattacctgagcgaacagcaacgcgacatcgccgaagacaccgccgccgacgtggatgcctcgaagctgtggccgggccgtgtggtcaccgaaatcgaaccggcggggccgttttgggaagccgagccggagcatcaggattatctcgaacgcattcccaatgggtacacctgccacttcatccggccgaactggaagttgcccaaacgcggctgagaaagggatcaggacgtgtgggccgtcgcggcgtcccacaggtccgtctcgccaaaacggtcggcgccttgggtctcgaccatccagccggggtattcgcgcggcaactcgctgacctcatcgagctggcgaatgtcgtcggcagtgagcgtcaggtcgacagccgcgaggttgtccgcgagctgatccagccgcttggcaccgaccagcaccgacgtcaccgccggcttggccagcagccaggccagcgcgacacgggccgggctgcagccgtgggctgctgcaatcgggcgcagcacgtcgatcactttccaaccgcgttctttatccacaatcgggaaatcaaacccggagcgccgcgcgccctcgggtgacgggttttcgcggctgtacttgcccgacagcaagccgcccgcgagggggctccagatcagcaaccccatcttttcggcctccagcagcggcaccagttcgcgctcaaggtcacgcccggccaccgagtaatacgcctgcaggcattcgaaacgcgcgagccctgcccgggccgcgatgccctgcgcagtcgccagccgccacgcctgccagttggacacgccgatgtagcgcaccttgccctggcgcacgaggtcatcgagcgcgcgcatcgtttcctccagcggcgtgagggcgtccgtggcgtgaatctgatagagatcgatatggtcagtccccaaccgtttcaggctggcgtgcacggcgtccatgatgtgcccgcgagacgcgcccacctggttttttccgggccccatgcgcccggccactttggtggcaagcacatagtcgctgcgggcgatacccaggttgcgaaacgtctggccgaggatctgctcgctctcgccgcctgaataaatgtcggcggtgtcgaagaaattgatcccggcttcaaggctggccttgacctgggcatccgccgcgctttgccccactgcgccaatgtgcttatagatgccggtgccgctgctgaaggtcatcgtacccaggcacagctgcgagacgatgagaccagtgttacccagttgtttgtatttcatcacgaactcctgcggtcaatcggacaaggcggggcggcgtgaggccgacccggtttcgaggtttatcctctgaccggccaggcgttggtcggtagcatgcttgtcccggatgcttgcacgatcgtccggatgcgcggacggctggctttcgcactcggccaaatcatgagaaaacaacggcatgccccaaccggtgaacgtgcatgaccccgctgacaagcttcgcccacctgatttcacgccagaccccaggcgacggcaccttcgacacgccggtggccggggtgaagctgatccgctggtcggtgccgagcgcgcccatgccggtgatctacgagcccaccgtctgcctggtcgcccagggccgaaagcgtgcgagcgtgggaacaacctcctatgtttatgatcaagcgcgccacctcatcgcctcggtggcccagccggtcatgggcgccgtgattgaggccagcgaggccgagccttacctctgcttgcagatcgacctcgatatcaaggaaatcgctgaactcgtgatgcgccatccctcgggcatgaacaccgccgcgccggcctctggcttgtcactcaacgacacttcgccagccctgctcgacgccgccgcgcggttggtagcgttgttcgaaacccccgccgacgtccccgccctggccccgatgatcctgcgtgaaatctactaccggctgctcaccggccccggtggcggcgtactgcgccacatggcacacgccaacagccggctcaaccagatcgcccgcgccgtggtgtggatccgccaacactttcgccaggcctgccgaatcgaacaggccgccgacgttgcaggcatgagccggtcaaacttccacctgcattttcgtgccgtcacctcgctcagccccctcgagttccgcacccaactgcgcatgcaggaagcccgcaggctgatgctggccgaaggggccgacgcggccagtgccgggttcgaagtgggctacaacagcccgtcgcagttcaaccgtgactactgccggttgttcggcgcgcccccggcccgggacgtggagcaactgcgtgccggcggcagagggagagcgctgggcgtcatcgagttgtgataaacactgaggactttccccgttcgaagaaggatgacttcgatgattcgcaacgcattacccggtgacgccaaggccattgcccaggtgcatgtcagcagctggcaagcggcctatcgcgacttgatgcctgcagactatttgaactcgctgggcgcgacgctggccaggcgggaagactattggaaccgtgcgattgaagcgcaggagccgcgcgtattcgttgctcaggtgaacgagcaggtggtggggtggatagcggttggcgccagccgtgatgaggcggttgctgggggcaaggtgggcgaggtgctggccatctacgtgttggcggattattggcagacgggcgtggggctggcgctgtggaaggcgggtttacagtggttggagcagcagggttatgcctgtttgacgctctgggttttgagcggtaatgaacgggctatccggttttatcgcagggtggggtgtagcgaggacacggggagtgagcgtggccttgagaggggaggcgtgtcgttggtggaggtgaggtatcggatgtctttggcccctttaagtaagcaagcatgatgcaggattcaacgtttgccattgtccgcataggccagatccgccagatcgctggattttgttcctcacgttggcggcattcacatcaatgggcacagacaaagcaaacgtacctgtaatttgttttatgaataagccggccaagaggtgataaaaaccaaggtgaaagtcgtgggatcagagacccgcgcagtagagcagtctctttcacaaggcatgggtgttccgagcggcccgccgacaaggcgagaggtcacgcggtactaagtcagcacagtgggagacgttgctccaatggaacttccttggctttattcctttgtgaggttggccgaatacctgcattttggccgggccgcatccgcactttgcctcagccaatcggcactgagcgtgcagattcgcaacctcgaatcggcactcggcgtttcactgtttgaacgcgacaggcggtcagtgtcattgacccgggcaggcgaaagtttccgccagaatgtgcagcgtatccttaaagaactcgaagccgccaaacgcaacgccaagcagtctgcgaccggggaagtcggcacgattcgcatcggattcgttcagtccgccgcgcttggcatcgttcccaggattgttcgctactaccgggaacacctgccgggcgtgcagttgaacatggttaatctgccctccgcacaacaagttgccgcactgctgcgcaaggacatcgacgtgggctttattcgcttgccgtttgaagccagggagctggctgtgcagccgttggaagaagagcctttcatgtgctttctcccaaggaaccatcccctgaccaagtgcaggaaaattgatcccaaggacctcggttcagagtctttcattctgtatgagcgccgccaggctcccggtttttttgaccgtatgctgagcatttgcctcgcgtcgggcttcagccccaacgcgattcaggaagcctgcgagatgcaaacaattttgagcatggtcgcatcggaaatgggcgttgccctgttgccgaagtcctcgggtgctctggggcttaccgaagtcgtgatgcgcccgctcgccggcacatggcctgcgtccgagacgggtaccgccgtgctgagtcagcacatggatgacgccttgatcgggcggttcctgcaggtcgccaaggcgcagagcggaacccggttgtaatgtgtttttccgatcacaggcggtcgatcatttcaagaagggcattgcgccgaaggtgatctaattcaagggggttccaacacgatgtaagcgaggatcacgatgaacagacgacacttcacgactcttacgatcagtgcagcagcggcagcgctgatcagaaacgcatctgcccagacattgccggcggtgtcccctggaggtctgctgcaggcacttccgagcccggttgaggggccgggcagttgccctgtgctgccagagcttccgctgcctttgtccaatgcgaccacgcaaaagctgtttcctggtttcaagtcacagttcatcaagacatcgggagcgacgatccgcgtattgaccaaaggcgacgggccgcccttgctgttgctgcacgggcacccggaaacacatgtcacctggcacaaggtcgctccggcgctcgccgcagaatatagcgttgtcataccggacttgcgtggctacggcgactccagcaagccggcttacagtgaaaataacagtcaatattctttccgggccatggcgctggatcagatcgaagtgatgaaacagctgggccatacgaagtttctggttgcgagccatgaccggggctcgcgggtagcccatcggctctgtctggatcaccccgaagcggtcaagaaagtcgtcttcatggacattgcgccgacgctgacgatgtatgacggcaccaacaaagaatttgcgacccggtacctgtggtggtttcttcagattcagcccagcccgatgcccgaacatctgatcagcctcgaccccgcgtattacctgcgcgaacacctgctcgtgcaaagcaagacgcccggtgcagtgacaccggaagccatggcggagtacatccgctgctactgctgcaaaggaaccattcgtgccgtttgcgaggactaccgcgcggccgcaggcatcgatcttgatatggaccgcgccgacgatgcggcgggccgcaaggttctggcccccgtgcacgccttgtggggcgcaaagggcacggtgggtgaactctgggatgtgctggctacctggaaatccaaggttgcagggcctttgaccggcaaggcgttgccctgcggccatctgctgcctgaggaacaacctgagcttgtacttgcggagttgcgggccttcttcaatgcctgagatgaggcctggattcaccacctgctaaccctgtcggaggctgctgggcgcagcctcctcgggatgtgcaatgggcctcagttaccctggtagaccggttttctcccttcagcttccgccttgcggccttcctgaaaatcgttcgatttatacagcgctgcacgttgcacatccagggcggacagcgcgtcggcttgtgccgggtcgatcacccgatgcgcagaagccagcgatgctttgatccccaaggggccattggcggcgatcttgttggcgatcttgatggcttggtccagggaagattttgcaccggcgatctcctggatctctcccatgcgataggcctcacctgcggtccagtgatcgcccgtcaggatgtagcgcatcgcgttgccccagccggcttcgcgcacgaagcgtacggtcgagccaccgcccgggtagcgcccgtgggtattttcgtcctgcccgaagtcggtgtttttcgctgcgacccgtatatcgccaaccagaaacagctcgtgcgccatattccaggtgtcaccgtgcaccgccacaatcaacggtttggtcaggaagggcattttcttgccgagcgggtcaatgaacccgtcacccagcgtcactccgcctgaggtggcggcggccttgaagccctcaacatcgaggccttgcgagaaattgtcgccatgcccgaacagcacggcggcacgcagcgacgggtcatggtcgaagtcgtaatacgccttggcgagggccagatacgcttccggatccagccggttctgaatggaaggccggttgataccgatcaagacgatctgaccacgacgctcgacagtgatcttgtgggctgcactggtcgcaatatcgaccatggtgacgttggcagcgggggctttggcgtcgtcgaccgattgcgcaaaggcagacgccgtggacagggaaagtgccgagagaatgaagatcgtctggaataacctttgcatcgatggttcctcgtgtggaatggatcgcggcgactcggcggggcaccgggttggcgtcgatgctggaaggttagaggacggagtgaatcggctataggcggccagcgggactaacttttattcctggttggaatgctcgtttacggcctgcgcaaaaagcggatgccttaatcagtgagcaggtgggtatctacaaatcggaaggtgaactccatggggtcggccgccaacccgttctgctgcatggagttggaaaaggcatcccattgggcgttgatcaggctggaaaagtcatctggaagacccatctgcctggcaactatttcaaaccacgttccctcgatggcataggtctcgcgcagtttgggttcaagttgagcaagggcattcaactgcccgggctcaagcttgccgatggattttaaaacgtagaaatccactagttttagaaagggtttgccttcgtagcggctcatcgctgcctccttgcgcatggggtgatgggggtattgaaccacacacccagacgcctcgcacttgaacccaaggcaggcgtttgctctaacggtataagtgttcaaatgagtctgaccccattatttccggcttttctttactccggcaagatctacgagtgagtgaaagtagggggcgttgttgcaattgttgcctgcccacgtgttctttgatcaccgcgtgcgttgtggcggctgttggaccgtgccgtatggcgcaatgggcgaaatcatcgagaactgtaagggtgaacggcggaatacggccagaaggagccagtcggaagcgcctatgagatcaggtgcaattctcttttcttaccatcgcgaaggcgctacgctcaaggcgcctctcgccattttccggaaccgataggacgggtagagagaaaacagagttcactatggaaggtttatatgactggctacctagacacgattccgcatccatggaatcggagccatattatggcggcaatgacgcaaagttttacggaagtgcagccttcaatagatcgaactccaggtggaaaaatttggaatgacttgaaagagctggatgatacggtatggattttctatacaagcatttccgagctaattgatgaaatttgtatttttggtgagcgaagcaagaacccagaattctggaatgagaggaatgaaaaaacggcagatcactacactagggaggtaaagcgaaagttatactattgcacctcctcgctcatgactttagtagatgtcgctagaacttttgatacaagacataagatagatgggccagggataaaaagagctgaaattttcaacactcccggcctgcataatttttttcaggatttgcggaacttcaacacgcattggcgtattgctgaagccaattggtcgataaactacgacatggaaaaaggtacacgaacggcgcattttctgataagcaaggatgatttgctcgagtggagcaattggtctgcaaatgcaaaaaaatacattcaagacttagacgaaagtgttgatgtttacgaaatacttacgaaatacaaaaaacaggcgcaaaaatattacgcgtggcacaagggtgcggtaattaaacaatgcgctcaagcgcttcaacaatattttgagtatacaaaaattcatgagggtatacgtcagtatcaaaaatggaacatgattctctcgcatgcaaagactgatacgaacccttttgaatacttagcacgatttcttacgacccctcaaattgaatcagtcctctcttaccctaagcatagtgaagatcaggtggatgctttgataagggcactagacacatatcagatctgcgacaacaatatcaaggctaaacttatgaagttgttttcgatatccgtcggacaataactaagagtgacatggttgttgtcaaaacaattttagatgtcgctaataaacttgctgcagacattgggtttgggagattctgtggcttgcgatatcaattaaacccctttagtcatattgcgtgctttagactctgcctatgctggctattttaacccggcaattcaagacctgtgaggaaaaaaacttgagttctgcatatgcttttgatcttaaattagtctgtggcggctatggctatttctcaacgttaacatcaggtagcgcgccggactctagcggccttgaggttcggaagccctcgttggtgaacggcgaaatgtttcctggcgcccttaaggagttaggagtaagttatattgtggttgataacgaaaaaagctactacgactggacttgtattcaagggtgggcgattgcagatgaaaaatttgtgagggaatacatggctcactggataaaaaaacgaaagtgcctgatctcaccttacgggtctttcacagatatcgagctggcatcggcatctattcgaaaaagaagctttcgaggaaagttcaaaaaaagaatattggatagagatggaaatcagtgtgttaattgccccggaaccgacggactaactttgcagcatgtaaggccgtattcgcaaggaggggaaactagctttagaaacttagtaacgttgtgtgagcgttgcaatcatgatatgggtgccgaaatttatagggagttatacgatctcgcaaacttacgttactcgtatgaaccttccttgcttagaaactctgaggtgaatgagcgagcaattcttcgagcagctcagttgtccagaaatattatgcatacacggtgtgagctttactagagtgttttagaaaagacaatttgtagggacgaaagcatatctggacgcttagcatttccttgaagtcggacgtccgctcttggccgattgctgcccgctacgacaggcagaaatcggccagaagcagaaatataaagagtctactaaacttggggcgattcagtccggcagagcacacataccagaactctcattttttgtagtctacgtacagcgtagttgaaagtggatttttgccgatctcgtaatcgggattcagtgtcgcgaggttgtgagcggcgatgccaacaccggccaccagacctacggcaagcgctcctagcgccactggtgcaccgacaatgctcgctccggcaaaaccagcaaccccccccatcgagaggttgcgagccatcatataaatcctgacagacatgccttctgtttcaatagcgttctccagccacgtcagagtgttggagtacctgttgaattcgccgcactcaagaacaaaactctcatgtgactttattttatttaagacaaaatcattagtcacatcttcaattttataaacattaacatccatgacgctttctccaggttaacactccagctcgctatcggcagagtccagcaaaactttaggggtgacttttaagtactgcatgaatagtttatgagctagtcactaagaacgatgaatatgttgaatcactcctgattctttagagcattgaatgactgcttttggccgcaagcggcttctcacttccgaaaggcaatgacccagcagccttcctattttcatgcttctacagcatgtcgttcccggcagcagggtgtatttaacccgctttctcagacaaaaaagcagcaagacaatcaaagaccactgagtcgccgtcagaaacgacgacgtctcggtgatctgccagcttattgatttgaaatcttagctatccgctactgagacctctcgctccatcaactgatccagcaacaaaacccccagctcacacaactggtgaatcgctagcgctacatcgcgctgctttcccgtcaagtcttctgacaggtcgagcaacaaggccgtaaccgatgaaaaggtttcgtagctgttggtgatcagggtctcgctgctggcgtcggcggcgacgctgaacaatccagcgggtggtggcaaatacggggcaggttcgatgggaggatagaggtaatgatcaatcgtacgatgtgccgcctgattgagtttcaggtccggctcggtcggagggttgggcgttactttgcacatacttggaatttcccacttgagggccgccacctctgagctactaaacaaaggggtggcagctgtgcgcaggttagtagaccggggaattccaagaaagccggcgcgcccgaggacgccctgcacacagccaccatcaagcacggacaagaccgtcctacagatgaggctcatgcactgactggaataaccccgggctactaaacccgatcactgagttgtcagcgaccgggcaaccttagagacgcccactccagcgcacaagccggcggattctgacgtacgcgtaggcaatggagcaagacgctgtcgcctaggactttgctgtttcagggcttgctgtaggacatgtactcattctgcaaaacaatatgttcgaccacgtacttcgcgtcgtgccacacgccatagataaacgacgacgcagggttgaccaggttgggcaggccgagaaagtaaatcccgctctgcgccgagatgccgcgcacgactcaggagctgcttctggctcggatcgaggcctgcgcaaaaagcggatgccttaatcagtgagcaggtgggtatctacaaatcggtaggtgaactccatgggatcgaccgtcgatccgttctgctgcatggagtgggaataggcaccccattgggcgttgataaggctggggaaatcatctggaagatccatctgcctggcaactatttcaaaccacgttccctggacggcataggtttcgcgcagtttgggttcaagttgagcaagggcattcaactgcccgggctcaagcttgccgatggattttaaaacgtagaaatcgactagttttagaaagggtttgccttcgtagcggctcatggctgcctccttgcgcatggggtgaggggtgtattgaaccacacacccaaacgccaggcgttacctcaggtcagcccggttttgcgctcaacctcctgccatcaggcacttcaacgtccaacaacagctcatcggtcgcgcgttcgaaatgctcaattaggaaatccagcaatacccgcacgcggggaacccggtaacggctgccgtgtaataccgcataaacgccggcctcttggacacaacagtcaggcaacaggacttttagccgtccagcacggatatcggcagccgcatcccagatggtcttgcgtgcgatgccatgcccggccaatgcccatgcgcgcgcgagtgcgccatcattggtttcccatgcctggttcatggggacggtgtggttccatgcctgaccgtccaccacaaagtgaaaggtgttcaatggccctgcgcccgtcaccagcacgatgaacgtgtggttaaccaagtcagccggggtctggggttcaccgtatcgcgccaggtagtcaggcgaagcgcagagtactcgccagttgggcgccagctgcctggcgatcattgagttttcatggggctggccaaaccggattgccagatcgacatcgtcctgcaccaggttcgacaccgaatccgatagcgtcagcgcgatggacagttccgggtgcaatgcactgaatgcctcaagccagtcattcaacaggttgcggccaaaatcggcagacgcggatatccgtaccttgccacgcacctctgtttggctggcttgaagccccgcttccgcctcgtcgatagcccgcagtgcgacccagcactgttgcagataaaaccggccttcttccgtgaggcgcaattgacgtgtggtgcgatcaaacaatttggtacgcagcgccgcctcaagcttgataaggcgcgcgctggccgccgcgggcgacagcgccagtttgcgccctgcggcagagaggctgccgagtgctgccgcctcgacaaacaaacgcatatcacccaaccggtcagtggccatattcaattcagatttgatagatcatcaaatggtaggccaattatcaaacctgtggcaattcctcacactccggtcttccatcctcttgagcacaggtcatgaccggcaaatcccactttgaaaatggctctttcacgccttcgggtcgtaccgaatatctcgcgaccgggcgcctgccagtggcggccctgttggcgctgaccatgggcagctttatcgccaccgccaacgaaacggtgccagcagggctgttgccgcaaatcgccgaggcattgggggtgtcgcaagcgtgggccggccagatggtgacagtctgtgcattgggctcagggttggcggctattcccttgacgctcgcgttgcaggaggggcgtcggcgcctgttgctgttactggccgtcggggtgttttgcgcaggtaatgcggtgacggccctgtcgccctggttttcactgacgctggctgctcgcttcatggtgggtattgcaactggcttggcgtggagcctgctggctggctacgccagacggttggtcattccacaactgcaaggccgcgccatggcgctggccatgctcggtatccctttggcactcgccctgggtgtaccgctgggtgcctggctcggcaaactgctggggtggcggtgcgtcttcgggatgctctcggggctcagccttttgctgatggcgtggatctatctgcaggtgcctgattatcccgggcaacgctccgatcagcgcctgcctctacgcaaagtcttgcaaaccccgggcgtacggcccgtgctggcggtggtcatgctttggatcctggcccattacaccctctatacctatattgctgcgttcctagcttctgtcgggatggccgatcaggttgatcggggcctcctttcattcggtatggcggccttgttcggtctatgggtgatcggcacgctgattgacggcaggcttcggggcctggttgtgctcagcctgacagccttcactttggtttcgtttgccctcgggctgggtcacctgcccgtcagtgcgatctatatcagcatcgtcttgtgggggatgagcttcggcggtgcgccaaccttattgcaaaccgccttggcggatgtggccggtgacggcgctgatattgcgcaatcaatgctggtcaccgtctttaacctggcgtttgcagccagtggtgtgatcggcggcgtactcctggaaacctggggggctggcgccattccctgggtagcgttggcgttgttgctgccggcgctgctggttgtctcgctggcctggtcagggcctacaccgcttcgcgactaaacgaagggggggggcagctgtgcacaggttggtagaccggcgcgcccgagggcgcgctgcgcacagccacgcgctgcggcctcaggctttgctgtttcagggcttgctgtaggccatgtattcattctgcaaaacaatatggtcggccacgtacttcgcgtcgtgccacacgccgtagataaacgacgacgcacggttcaccagattgggcaggccgagaaagtaaatcccgctctgcgccgagatgccgcgcttgtggaagggctcgcctctttcatcgaaggcatccacttgcagccagctgaaatcgaatttaaacccggtcgcccacagaatggtggtcacgccaacctcggccaggttcaggctgagcgtggggttaaccaggcattcggggtcgggcagcagttcccaggcgtcgggctcctgggggaagggcaggccgttggcttcgatgtaggcgtcggcgtcgcgcagcacgtcgaagtaggcgcggtcgccttcggccacgttggcggccaggccgggttcgaaggccatgacgccgtcgtcccaattgcgcgtgacgcccaccaaatggatgccctggtgggcgagccggcgaaagtccaccgtcttgccgccttcgtagccactgacggcaaaggctacatgctttttcttcggctggattttgacttcgtcccacaagcccagcgcgccgagccaccagcaatagtcgcgaccacggtaagcgcggggtgggcggtagtgttcgccgacggacaggtagacggttttgccggccttttgcagttcttcggcgatctgtgagccggaggcgccggcgccgacgaccagcacagcaccttcgggcagttggccggggttcttgtaggtggaggagtgcagttggtgcagcggcgccgacgcagggacgatagtggggatcgatgggcgctggaaggggccggtcgccgccaccacgttggcggcttcgatcacgcctgccgaggtagtgaccttgaagccggggcggcccacgtggcgttccacttgcagcacttccacgccggtgcgcacgggggcctgcaacttgtccacgtaagcttcgaagtagtcggccatgcgttctttgggcgggaaggcttcgggggaaatgccctcgaatttcagccccggaaagcggtcgtgccaggccgggccgttggcgaccagcgagtcccagcgctccgagcgccagcgttcggcgatgcggtggcgctccagcacgatgtgcggcacgcccatcagggaaaggtgttcgctcatggccaccccggcctggcctgcgccgacgaccagggtgttgatggtttctactgacataggggcttcctgagtaaaagatttatgtgcaacgccggggctcgaaggtgggagctggcttgcctgcgatgcgggcggcccggtgtgtcaggcggaccgggttgatggcatcgcaggcaagccagctcccacagttgggcggtggtgtttttaaggtttcagcaaggtggccaccgccgtcagagccagctcgtaacccagcgcgcccaacccggcaatcacgcccgtggcagctttggacacataggactgatgccgaaaactttcgcgcttccagatattgctcatgtgcgcttcgatgatcggcccgtcgaaggccagcagcgcatccagaatcggcaccgagctgtagctcaacccggcggcgttgatcacgatggcgtcaccgttgagccgggcctcttgaatccagtccaccagcacgccttcgtggttgctttggcgaaacgccagggtcaggcccagctcggtggcatggcgttggcagcgtgcttcgatgctggcaaagctttcgctgccgtaggtgccgcttttgtccagcccatagaggttggcgttgggcccattaaggaaaaacacgcggtggctcatggcgtactccaggttgttcagggctgccagtcatccggcaccacggcgatcacgtcgatttccatcagccattccggctggcccaggccggaaatcaccagcccggtggagatcgggaacacgcctttgagccatttgccgacttcctgatacaccggctcgcggtagcgcgggtcgatcaggtaggtggtggttttgacgatgtggctcaggtcggaaccggcctcttcaagcagttgcttgacgtttttcatcgcctgttcggcctgggcgcgtgggtcgccgaggccgacgaggttgccgtcgaagtcggtgccgatctgcccgcgtacataaatggtgttgccggcgcgcacggcctggcacaggtcgttgtccagcgcctggttggggtaggtctgcttggtattgaacatgcggatgcgggtgtgggtgggcatggcggtggctcatcggcagcgggatgaaggcagcttcacaccgcccccgttccggcgaaaccagcatttgcgcggggtagtgcttaggaaaaaccgaagcctgtgcgcctcgtcggctggggctgtgacccggcacgaactctgcaacaccgacggtgcatacctatttgctgctgtggaggcgtgatgctcagtcgtataacccaacgccagctggaatatttcgtcgcgtccggcgaggcgggcagcatcagtgctgcggcggaacgcattcatgtgtcgtcgccgtcgatctcggcggcgatcacgcacatggaagcggaactggggattcagctgtttgtgcggcatcacgcccagggcatttccctcaccgccgtggggcgccaggtgatgcaggaggccaagctgattctggagcagatgaccaacctctacaccatcgcctccgaatcgttgaacaccgtgcgcgggccgttgcgcgtggggtgcctggagtcgctggcgccgatgatcacgccggaactggtgttcgggtttggccgcgcgtttcctggtgtacgcctgacccaggccgaaggcaaccatgaggaactgctggaaaaactgcgcagcggcgagctggatatcgccttgacctatgatttggtgaccagcccggatatcgacttccagccgctggcgcagctgccaccctatgtgatggtcggcgagtaccacccgttggcgagcgctgcagcggtgagcatgcaggacctcgaaacttacccggtggtgctgctcgacacgccgtggagccgtgactatttcctcagcctgtttatccaggcgggcaccacgccgaacatcatcatgcgctccaccaacctcgaaacggtgcgcgcgatggtcggcaatggcattggctattcatttgcgaatgcgcggcccaaatcgaacctgtcccaggacggcaaacgcgtgattcgcctgcgcctggcgggttcgcaccggcccatgcgcctgggctacgccacggccagcaacacccagctgtcacgggtggtgtcggcgtttgccgagcgctgccgcatgtttgtgtccgaccagtacatccccggcatggcgccgccgagcttttttgatccgcatgcggtgcgggtgttgagtggtgtgagctgaggttgcaccaataagtggcgtgtgcgttttgctcgcgcaccattttggatgagggctccataccaggcgcaacacagatccactgtgggagctggcttgcctgcgatagcggtctgcctgtggatgagatgccaactgagccaccgccatcgcaggcaagccagctcccacattcgatatcagtgccttcaactggctgcataggttctgcctacccagtgccccggcttttacgaattgaccctgagcacctcccgccacgactctgaacccatcgatgtcgatccacttattcagggcaccaccacgatgactttcgactggcactacatgtttggtttgctcggcgatgccgagttttggcgcgcgacgtggacggtcatcaagctcagcaccctgacctggctgttgagcatcgccctgggctttctactggccctggccaaacaatcgaaaagcccgctgctcagcctgcccgcccgtggttatatctggctgttccgcagcttgccgctgctggtgctgctgatctttatctacaacttgccccaggcgttgccgggcacctcggcgattctggccgatccgttctggtccggcctgctggccttggtgatttgcgaaacagcctacgtggccgagattcaccgaggcggtttgctctcgattcccaagggccagggcgaggcggcgcgggcattgggcttgcggttctttggcacccagattcgcgtggtgattcctcaagccttgcgtgtggcgctgccgtcactggccaacgaatacatctccatcgtcaagctcacctcgctggtgtcggtgatctccctcaccgaaatcctgatggtcggccagcgcctgtattcgcagaatttcctggtgattgaaaccatggcggcggtggcgtttttctacgtgtttatcgtcacggtgttcgacttcttgctcaaacgcctggagcgttttctcgacgtcaaccagcgcaacgtttcgcgtgtgccggacgcggcggtgctggccctggccactcaacaacgcccggcaattgcgcgcccggccagcacgggtgtggccgcgttgcaggcttcgcggttgcacaaggcttacaacgacatcgaggtgctgggctcggtcaatttgcaggtgcagccgggcgaggtggtgtcggtgatcgggccgtcgggttcgggtaaaaccacgctgatccgcctgctcaacggcttggaacaactggacaacggtgagatccatatcaacggcttgccgttcattcatttgagcaaaaccggcgcgctcaaaccccagttcatcgagcacgccgagcaccgcctgaacatcggcatggtgttccagagcttcaacctgttcccgcatttgagtgtgctcgacaacctgctgatggcgcccaaataccaccgcctgggcgcgacctctgaactgaaacaacaggcctacgcgctgctgcacgaggtgggcatgctcgaccacgcctggaagtatccgcaccagttgtccggcggccaacagcagcgggtggcgattgcccgcgccttgatgatgcgcccgcaaatcatgctgttcgacgagcccacctcggccctcgacccagaaaaagtcaacgaagtactccaggtcatcgaagccctggccggggagggcatcaccatggtgatcgtcacccacgagatgaatttcgccttcaaggtatccgaccgcatcgtcttcatggagaagggccgcgtggtctgcgacgacacgccggttgccctgcgcagcggccataacccacgcgtggaggcgttcctcaaggacgtctcgctggcgtgaaccctttaacgttgaggaaccagaaaatgatcgggcaagcgcaaatcgaacaattccagcgtgacggatttttggtggtgcaggacgtgctctcggctgacgaagtggccgcgctgcagcatgacttcgaccaatgggtggaagacagccgcagccacgttgaaggctggggcgccacggtggatggccgcgcgcggtttgatctggagggcgaccatcgcccggatcacccgtcgttgcgtcgggtgagttcgcccaccgagatttcccctgcctatgaacgcgtggcgttgcattcacgcatggcggcgatttccgcccagttgatcggcgccggtggcgcgcgttttcaccacagcaagatcaattcgaaattgccccacaccgcgacccaggtgaagtggcaccaggacttcctgttcacgccccacagcaacgacgacatcgttaccgcattgctgatggtcagcgaagtcaccccgcaaaacggcccgctgaatgtgatccccggcagccacaaaggcccgctgtggtcgcactggcagaaccagcgcttcaccggttcggtggacgatgcggttgtcgaggaacactgccagcaaccggtggcctgctacggcccggccggttccgtgtgcttcatgcacacccggcttttacatgcgtcgagccctaacgagactgaactgccgcgcaccctgttcatcagcgtctacgccgctgaggacgcgctgccattcggcgaaaacccattgcccagcgcacacgccggcctgctggtagccggtgaagaaagcggtttggtgcgctccacggacaaccacatgcgcttgccgcagaaaccccgtggcgcctcctttttcgtgcaacaggccggtcaagactccgccactgcctaactgcttaatccacaagcttcttaaacccttgcaggtaatgaccatgacagcatttcgtaaaagtgttcgcccccttgccgtgtgcctgctgggcgctgcggttgcactgacctcgctggccgcttcggcgttccagcaggaaggcaagatcattgccggttctgacgtgacctttttcccgtatgagtacatggacaacaacaagccggcgggctttgatatcgagttcatggaaggcctgggcaaggtcatgggccgcaaggtcgagaccctcgacacgcgttttcccaacctgatcaccggcctgcaagccgggcgttttgacgtgaccaactcgtcgatgtacatcaccgccgagcgggtcaaagtcatcgacatgatcccttacctgaaaagcggcgagtcgatcctcaccctcaaggacagcgcttatcagcccaagaccccggaagatttctgcggccacaagcttggctccatgggcgccacgtcctggctggcgcagatgcacaagctgtcggatgactactgcgtggccaagggcttgaagccgatccagatcagcgaatacagcaccgacccgcaaaccacccaggccttgctcgcccacgcggttgaagcgcagatcaccgacgccgccgtggcccgtggggtgatcgacaagctgggcagccgcgtggtgatttcctccgacaccctgatctacccggtgctcaacggcttcggcgtgaagaagggcaatgacgaggtgaagaaagccctggtcgatggcctggcaaaataccgcaccacccctgagtacgcggccttgctgaagaagtacaacttccaggcgccgaccgacgctgacatcgccgagctgatgcccaagtaagccaatcgcgcgcgccgcagccctttgcggcgcgcgccctgtggagaccgattcatggcgttatccctcgaagaacaggcgcgcatcgacctggcggcgacctttcgcatcatcgcccacgtgggcatgcacgaagcggtggccaaccacctcagtgcggcggtgtcgaccgatggcaaacagtttttgctcaaccccaagtggaagcatttctcgcggattcgcgccagtgatttgctgctgctgaacgccgacgacccggccagcgccgaccaccctaatgtggattccaccgcctgggcgattcacgggcagattcaccggctgttgccgcaaactcgcgccgtgctgcatttgcaccccatctacaccacggcggtggcgtgcctggccaagccgcatatcccgccgatcgaccagaacaccgcgcgctacttcaaccgcgtggcggtggatgaactctatggcggcatggccgacaccgaagccgaaggcgcgcgcctcgcagggctgctcgacggcaagagccggctgttgatgggtaaccacggcgtgatggtcaccggggtttccattggcgaagcgtttgacgatatctggaacctggagcgtgcctgccagattctggtcacggcctggtcaaccgggcagccgttgcgcgtgctgtcggatgacgtggcggagaaaaccgcgcggggctgggaaggcattgccgatttctcgcgccagcactttgaagagatgaagcaattgatgatcgaggccgacccttcggtgctcgactgagggctttttatgacgttttccgttgccgcccgctgcactgaaacgggccagttgggcattgcgatcagctcgtcgagcattgcggtgggcgcgcgttgcccgtggctgcggcccggcgtgggcgcggtggcatcgcagaacatcaccttgcccagcctggggccgtctgtgctggaccggctggagcagggtatgacgccgatcgaggcgttggcccgggcccttgaacacgaagaacaccatgaataccgccaggtgacggtgattgatcatcaaggccgcaccgcgcatttcagtggcgcgcagaccttgggcattcatgcggcgctgagcggtgagcagtgtgtggccgccggcaatatgctcgccaaccccggcgtgatcggcgccatggtgcacgcctttgaacacgcgccggggcacctcgccgaccgcctgctcgccgcgatgcatgccggccaggccaaaggcggcgaagccggaccggtgcattcggccgcgttgattgtggtggatgacctgttgtggcctatcgtgaacttgcgcgtggactgggccgacgaagacccgattggcaccctggaccagctttggcaagcctatcgcgggcagttgcaggcctacatcgaccgcgccctcaacccgcagcaggcgccgggctatgccgtgccgggagatgaccgatgagcagcagccgcgacctgctcgcgcacttggtgcgcttcgacaccaccagccgcgaatccaacctggccttgatcgattttgtgcgcacctatctgcaaggccatggcgtggcgtgcgaactggtgttcaacgaacacaaaaacaaggccaacctgctggcgaccatcggcccggccgacgtgcccggcatcgtgttgtctggccacaccgacgtggtaccggtggacggccagcgctggagcgtggcgccgttcgagctgacggaaaaggacggcaagttgtatggccgtggcaccgccgacatgaagggttatatcgcctgcgtgttggccagcgtgccagcgttggtggcggcgccgttgcgcctgccggtgcatatcgcgctgtcctatgacgaagaagtcggctgccttggcgtgcgctcgctgatcgaaaggtttcacacgaatccggtcaaaccgctgctgtgcgtgatcggcgagcccaccgagctcaaaccagtgctgggccacaaaggcaagctggcgatgcgctgtgaagtgcacggcgcagcctgccattcggcgtatgcgccgtcgggcgtgaatgccattgaatacgccgcgcgcttggtgggtgagctggtgcgactgggcgaaacgctcaaggcgccgcagcatctgaatgcacggtttgatccaccgttttccacggtgcaaaccggcgtgattagcgggggcaaggcgctgaacatcgtcccgcagcattgcagtttcgattttgaagtgcgctcgttgccggcccagaacccttggcaggtggcagaccaactgcgcgactatgccgagcacagcttgctgcccgcgatgcaggcggtcagcgcacagtgtgcgatcaacttcagcgagttatccagctacccgggcctggccacctcggtcgaaagccaggcggccgaatgggtcgcgcagttttgcggctcccgggattacggcaccgtggcctttggcagcgaaggcgggctgtttgaccaggcgggcattcccacggtggtgtgcgggccgggcagtatggagcaggggcataagccggatgagttcatcagcctggagcagttggcggcgtgtgatcggatgctggcgcgggtgcttgggtttgtgagctgccggcacgggtaaacaatgtgggagctggcttgcctgcgatagcggtgggtcagctgacccctgtttggctgatagattgctatcgcaggcaagccagctcccacactggatttgtgtgggtttatctggcaatcaggctctttccttcttcgccacacccactcgccattgcgccggtggcagcaacccattgaccaggtagttgcccacaatccgcgacttgtatacccgcggattgtggttcgccagcgtgcgcgcgttacgccacaaacggtccagcgccttgtcgctggccgtggcgctggcgcccagtgcgtcgaacaatgccgtggtcgcggcaagcgtggcgtctatcaccgggttcaccgccaggcacacttccagttccgccagtgccacctgcgggtcgttatcatgcagcggctggtcgtgggcaatcaggtagtgcgcggtgtcgtccaaacgccgcgcggcttgctgggtgatggcttgcgcggcataggcctggctggcgacttcgccgatcacttggagcaattgcacgtcttgcgcggcggaatctgcgttgccggtggtgaaggttctggcgcgtgcgccgagttcttcggcgccactgagtgccgcgcggcgggcgatgccggcgagggtggcgaggtggtagatctggaagaaggattggccataaccgaaacgttgcgtggtggggcggccttcgtcgaccagcggggcgttgtcgaaaatgcacgtgccgctggcggtcaggcgctggccgaagccgttccagtcgtcgacgatttgcacgccgggggccttgaggtcgacgaccacgctgtgggtctcgccgtcttcgcccgtggcgatcgtgttgatcaggtcgctgtagagcgcgccggtggtgtagaactttctgccgctgatgcgcagcgtaccgtttgcatcgcggtgcaggcgggtttcgaattcaccacgggtctggttgccgacttcagtgctgcctggcgagagcagggcgccggtgcttagccggtcgagccagatggcgcgccagccttggtccttggcgcagagcacgtcttcgcaaaagccgaaatgcccgcgcagggcttgggtgatgttggagtcggcggcagagagttcggagagcaaggcgagcaattcggcgaacgtcgcgtcctggccaccgtaacgcgcgggcagacgccagcgcggcaagcccagtgcgttcagttgctggataacctcggccaagctggcgcgtgtctgatcagcctcggcggcttgggccagaatgtgtgcgaagagcgggcgaaacggtgcagccagttgttcataacgggcagacggcggtgcgccccagatattcaaagcaggattggacatgattgaccttgccgggccggcccgcgtggtcgcggcggcgctgtaaaaaggggttcaaaagcggggcccagtggtctggtgacgtcaccctaacccacgggtggcgaagtttttaatacgaaaaatagctatcgaactgcacggcggttctatcgatagtgcccaacagtattaaacctcacgcttttattgcgttagcttctacgagcgccatgcttggcgaccgccaaactcactccctcatcaccagactgcacgcccacagatggttgagtcagccttcaacctgtggaatacgttcatgatcaatcgtcgcaacctgcttgccctgttgggcctggcctcattcacgctgcacggctcttcggtgtgggccgcagagcccctgaccctgaccgtgggcgaccagttcttctccaaccgcatcgtgctggagctgtctggcgagctcaaagacctgccgtacaagatcgacttcaagcgtttcaataccggctcgccggtggcctcggccgtggccagtggtgcgctggatatcggcattgtcggggatacgccggtgatcagcctcgccgccaatggcgcgccggtgaaagtggtcgccagcactcagaccagccttgacggcgtggggattgtggcgcgcaagggcattgcgtcggtggcggatctgaaaggcaagacggtcgccatctggaacggctcgtggagccagcaactggcgtacaaagccctggacgaagccggcgtgccgcgcagcagcgtgaccttcaaatacctgctgcccgccgaagccagcctggcactgacccagggtgacatcgacgccttcggcacctgggaaccctatgtgtcgttgcaggaaaaagaaggcagcaggcttattcgtaatgccaagggcctgatgagcgcgccgacctacatcgtcgcgtacgaaccggcgctggcgcaaaaaggcgcgatcatcaaagactttatcgcccgcctgacccgcgcacgggtgtggagcaacagccatatcgacgagtacgccgaagcctggtcgaaggccaaccagtccgcgccggaaattgccaaggtgtggttcaagcgcgacgcgatcacggtgctgccgatctcgccgacgattgtcagcgaagcccaggccacggcagattttctggtggatgcacagatgctcaagcagcggtatgacgtgacgccgttatttgatcgggcgctttaaacggcagggaaacaagcgctaatagaattgaacggctgctcctgcggggctgggctaggtttttttgatccggagctcaccggaactgaaaattcactagcatcggcaaggagtagccagtaggctacatgtgaaaacgtgactaatttgatcggcaggacgccggagttcgacacatggctcgacggcatgaaggatatttgcgggaaaacggcggttctgactcgcttggaccgcgccgaagaaaacaattttggcgactgcgaggcagtaggcgacggagtcagtgaaatgcgtgtttttgtcgggcccggctacaggatttattttgtgcgcacgggcattgccgcttacctgatgctgtagggcagtgacaagaccgaccagaacagaggaatcaaacgggcaaaagagatccttgatgccctgagaggtcaatgaaaatgagcgaatcaaccttcaaacccgaggacatgccgatcctcgaccttgatacatccggtaccagcgtttacgaggcctcgcgcttcctcgacagcccggaggtgatcagtgcgtatttggcgcaaagcatgaaatcgcaggacccccggatcctcatgaaggcacttgccgaggtggccaaggcccaaggcgtgaacaaggtggccgaggcggcgggggtcaatcgggagagcctttataaaaccctgaaaggcggctcgaaaacccgttatgagactgtgcagaagctgatgctggccttgggagtagagcttacggtgcagccgattgcagccaggaaaacggccagggcgaaagcggtgtcggccaccaaaccctgatgctaaagcgcccctttttaggggcgctttggtttccatggcgttatcgcaccaggcaaggctgcttgttgttgaagctccagcccggaatcaggaactgcatcgccacgctgtcatcccgcgcgccgaggcccatgcctttgtaaagctcatgggctttggccaccgcgtccatgtcgatatccacgcccaggccgggtttgctcggtaccttcacgtaaccgccttcgattttcagcggctctctggtcaggcgctggccatcctgccagatccagtgggtgtcgatggcggtgatgtcgcccggcgcggcggcggcgacctgggtgaacatcgccaaggaaatatcaaagtggttgttggagtgcgagccccaggtcaggccccactcgttgcacatctgtgccacgcggaccgagccctgcatcgtccagaagtgcgggtctgccaagggaatgtcgaccgattgcaactgaatcgcgtggcccatttcccgccagtcggtggcgatcatgttggtggcggttttaaggcccgtggcccggcggaattcggccatgacttcacggcccgaataaccgttttcagcgccgcacgggtcttcggcgtaagcgagtacgcgatgttgatcgcggcacaggcggatggcttccttgagtgaccaggcgccgttcgggtcgagtgtgatgcgcgcatccgggaagcgctcggccagtgcggtgacggcgtcgatttccgcatcgccactcagcacgccgcctttgagtttgaagtcgttgaaaccgtatttggctttggcggcttcggccaggcgcaccacggcttcgctggtcagggctttttcatggcgcaggcggaaccagtcgtcatcagcgtcggcttcgttgcgataggccaggtctgtcgcgctgcgatcaccgacgtagaacagatagccgagcatttttaccgcatcgcgctgctgcccttcgccgagcaaggctgccaccggcacttcgagaaattgccccagcaggtcgagcagcgcggcttccatcgcggtcacggcgtgaatggtgatgcgcaggtcaaaggtttgcaggccgcggccggcagagtcccgcgaggcaaaggtgctgcgcatttgattgaggatgcgttggtactggccgatggattggccaaccaccaaattgcgcgcgtcttccagggtttcgcggatgcgctcgccgcccggcacttcgcctacgccggtatggccggcgctgtccttgagtatcacgatattgcgcgtgaagtagggcccgtgggcgccgctcaggttgagcagcatgctgtcatggccggcaacgggaatgacctggaagtgggtgacgacaggggtattcatggcagtttcctgagtaagcttaaagaggtttgctgagggcggcgccggctggcacggcgcttggcgcggtcagtacggcagagggagcggtcttggcgaagaacaccaggatcgccgcgagcaccgacgtgccggccaggccgtagaggccgccctggatcgagccggtggtctgttccagaaagccgaaggtagtgggggcgacaaaaccgcccaggttgccgatggagttgatcagcgcgatcacggcggcggcgatgcgcacgtccagatagccctgcgggatcggccagaacagcgacgaggccgacttgaaaccaatggccgcaaagcaaatcgcaacaaaggcgaagatcggcccgccggtggtggacatgaacatgccggccgccgcgatcaacagcgctgcagcaacccaggcctgctggaacttgaacttgcccgacagcgaggcgaaggcgtacatggcgatgatcgagatcagccatgggatcgagttgaagaaacccacctggatatcgctcaggtcacccatcttcttgatgatgctcggcagccagaatgtcgcggcgtagatcgtcagctggatgcagaagtacaaggcgcagaacagcaggatctggcggtctttgagtagcttgccaagggtcggtttgaccgtggtcagtgcttcgcgctcacgctgttcctgatcgatcgcgtccaccagcgtgtcttgttcttcgcgggtcagccattgggcgtcatggggtttggagtccagccagaaccacacgaaaaaacccagcgccaccgaggccaggccttcgatggcaaacatccactgccaaccgtgaaaaccaaagccttcaatctgcaacagtgcacccgacagcggcccggatatcagtgaggcaaccgccgacccgctgaggaaaatcgcaatggctttgccgcgctcaacgccgggcagccaacgggtgaagtaatagatgacgccggggaagaaccccgcttcggccacgccgagcaagaagcgcaggatgtagaactgggtttcgttctggatgaacgccatcaaggtggcgacgatgccccaggtgaacatgatgcgggtcagccagatacgtgcgccgaccttttgcagcagcatgttggaggggacttcgaagagtgcgtagccgataaagaacagcccggcaccgaggccgtaggcggccgcgccgatgcccaggtcatgctccatgtgggtgcgcacgaagccgatattgacccggtcgatgtagttgaggatgaacatgatcacgaacagcgggagcacatggcccttcactttgctcacggcgcgcgcgaggacggaatcactttctgaagcggcagatgcgtggcttgaattgttcacaattcaaaactccccctgattatttttatgcgggtttgcgtgttttgttgatagacatcatacaagtgcttttctggggatcgcaatgcaggggtgagtgtatttgtttttataagcgcggtggctgagtgcgtgatttggttatttgcccaatatttactgggttttttgcgaggctaggtgtggtgaaaactgcgtgtgagacacttgctggcaggtgttggagagtttcttgactaggctggaataggttggttgtcatacaagttgtattggtttcgaaacagctcggtgagggtgttaagctcccaccagcccaaccccgtggacccgtaacgatgcccattgaaagcgcaaatgttgttcgccgacgttccaacaacctcgcccagggcgtggtcgaggcgctgagccagcgcatcctgctcggccaactgaagcccggggaaaaactgccatcggaatccaccatcgtgctggagcatggcgtgagccgtacggtcgtgcgtgaggccatctccaagttgcaggcgtcgggcctggtggagacgcgccacggtatcggcacgttcgtgctggcgccgcatgcccagcaaggtttgcgtttgaatgtggacacggtcgccagcgtgcgcaacatgctggagctgcgcctgggcctggaggtgcaagccgtggcgctggccgcactgcgccggtctgacgagcaactggcccacatgcgccaggcgctggacgactaccaggcctcgctggccaacaacgacagctgcgtggaggaagacaaacgctttcaccaactgatcgcagaagccaccggcaatacgtttttcaccgagatcatgctgcacctgggcaatgcgatgatcccgcgcacccaggtcaagggcgacgagcgcggcggtgccgacttcgcccggctcgggcagttggcgaacctggagcacgaggcgatcttcaatgcaatcaaacgtcaggacccggacgccgcaagggcggcgatggtgctgcacctgaccaatagccgcgaccggttctcgggtgagtaatttttttgcgacaaggaacaaccgttgaacgaacacactttatccctgcgcctggagcgcgtggcggcgaacgtgcctgccggagcgcgcctggccgatatcggctcggaccacggttacctgccggtggccctgatgcgccgtggctcgatcactgcggcggtagcgggggaggtggcggccacgccctttcacgcggcccggcgcacggtgcgtgataacgctctggagcagcagatcagcgtgcgcctggccgatgggttggcggcgattgaacctggcgacggcatcaccgcgatcagcctgtgtggcatgggcggcgagaccattcgcgacattctcgaagccggcagggcccacctgggtggcggagaacgcctgatcctgcaacccaacggcggcgagcaaccgctgcgccaatggttgatgggcaacggttaccgcatcctcactgaagagctgctgcaggaaaaccgtttctactacgaaatcatcgttgccgagcgcagcgggcctgtgatctacaccgatgaagagctgtacttcggccccctgcaaatgcaggcgcgcagcccgcagttcctggccaagtggcaacgcatgctgcgccagaagcacaagaccttggccagccttgagcaagcgctgcaatcggtaccggaagataaagtgcaggaggtcgcccgacaggctcggtggatcactcaattgctggcttgagttggcagcagtgaacgcgatcacacaacgcgggtcgttactttaccccggcccttgcaccgcccatgatgggcgtctcgcactcatggaggaacctgcgcatgttcggcactctgttcgacaaactcttcaatcgccccctgaccgaggaagccttcgcccaaaaagtcatcaaggctgcccgcgatgcgggcttcagtggcccccttgaatacgtgccgaatgaatttcgcctcagccatggcgacggcgacggctacttcaacctgcataacgcgttccgtgactaccagagtgccgaaaagtcgcaaaagcccaatgtgttgaacgggtacgcctcgaccctgctcaattacaaaaaggatgcgccgcaaagctttgaagaggtcaagcctttgctacggccagtgattcgtaacctggcgatgctcgaggaagtgcgcctgcatcaggtgcgtaccgaaggctgggacaaggctcacgctgctgtccaccaagccctgggcaaagactgcgtgaccttgctggccgtcgactatcccgagaccaccgcgacgctgacggatggcccgaaggaaaactggggcgtgagcctcgacgaggcgctggcggtggcggtgagcaacctgcgcgaaatcaccccggacgcgttcgacgaaattgtgcctgggctctacattggccgctggaacgacagctatgacaccagccgcgtgctgctgccggatgtgctccagcgcgcgccgatcaaggggcgcccggtgttcatgatcccgacccgcgacgtgctgatggtcaccggtgacaaagatgaagacggcatccggcatatggtcgaggtctgcttcaaggccatggaaaacgggcgcgtcgtctccagccaggtctatacgtatgagggccaacggattgtgccatttgtcacccaggacgaagcactgctgtcgcgtatggcaagccttgaacgcatgttgcttgaaggtaattacagcgcgcaaaaggagcagctcgacacgattcatcaagagcaaaatatcgacgtgtttgtggcttcttacaaagtgctcgcgttcaagggaggcgacggccagcagttttcgctgagcagttggacgcaaaccgtggacaccttgctgcccaaaaccgagcgcgtagcgctggtcacgccacaacccgatggcactgtccagacccggattgttgaatgggctgatcttgaaaacctggcgggtgatctgttgaagccgatggacatttatccgccacgctaccggacgctggggttcccgacggatgagcagttgagccggatgacgtcgttggtttagcccccgcgtctgcaaacctgttgccggatatgctccaatgaccaccctcattcgtttatccgggaaccccctcatggccgacgccaccgaccaagccttctacgaccgcgcagacgctcatatcgagttgtcgaacgagcagctcaaaacctgtgacaacttcggtgaggtcagcgcctcaatgatgttcggcgccacgcgcttcaatgcttgggcgtgcgcccgcaacttcaagtccggcgccgaaatggcagcggcgcgggaggcgatgctgaagtatttctgtgatcagtaccggatgatgctggaggacaatctggatgaccatatcaataatttcagtcagtacgggctggttaaagcgcaaggttgagctgagcgtttcagaaaatcggcaacctcgcgtgcagtgcgcagatgaatgaccggaatatgcggcccgatagccaggcgcaccgcatcaatacgcgggcggctcacccggtcaaagttccagcaccaactcaggaaggtcaggaacgccctgtccagtttctccttgcagcccgccggtttgtccgtgcggggccggtccagcaggctgcgcagcagcacacgtctcacgcacgtggcacgcggggtgtccagccagatgaccaggtctgcgcggggcaggcgcaggtcgaaggtccggcgcgcgtaattgccctcacacacccagcgatccggcgcgatggcctgctgaacccgtgcccggaagatagcgttgtcggcctccacccagcccggttcccagaacaatctgtccaggtgaaccacgggagcgtccaggcgtttgcccagttcgcgcgccagggttgatttgccgctaccggcgttgccgagtatgacgatgcgttgcatgccgcaggccctttgctgaaaacttaaaaaaccggacttcgtctccgggggttacaggtgtgtgttcaacactgagtgtttttgccccatttttgtgcgcggctcgatgattaaccgccgtcgcagcgcctatctccggccccggcatctgcggcccgtatcttgctagagccaagctaatcaatgacatggcattttgcttccagtcattttcaggttgcttcagggagtggtcggccatgcacagtcttttatcacccggtatccgtctgctcggccgtttcggtttcgcgcgcaagtttcagatcctgttcttcctgttcatgctgcccctggccgggagcctgtggatgatcggccaggattatcgcgacaaactctcggtgattgccagtgaacagtccggcgtgcgccaactgctggccctggacacactggatggccaactgacgacgcaacgcaacctggccgcgcgctggaaagcactggacatcctgcacaccccgacgcctgccgcccaggccgcgatggacaaggttgacgcgggcagccccgcgattgcccaaagcctgcaagccttgggcgatgccctcaaaagccagaacgccagcgccgacaccctcgcgcgtttcgaggcgctgcaggcgacggtcaagggcatggacactcaagccctgcgctccgtgggttggtggccggacggttacgatcgtttcaccgccgccctgactgcgatgcaaaccctgcgtgagcaaatcacgctggatgccggcctgattctcgacccctggctggaaacctacctgctgatgcagatttccacccagcacacgccggacctgatcgagcgcatcggccgtacggcgagtgtcggtgagtcgtccatcgcctcggggcagttcaccctgcaaagccgcttgcagatgcgcgacctgcgtggccgcatcggtgatgcgcgtgaccagttggccaaggccgccacctcgctcaaagccaagcaatacgcggggctggaaccgtggacggcgcaatacgacaacagcctgcaattgctggataacgagctcaaagctctggacgacggggtgttcggtggcaccatcaaactcgataccgcaggcttcgaccgcagtgtcgacagcatgctcggcgccttgggcgcgttgcgcagccagtcgctgaattcgctggatgagcgcctgggttactaccgcgaccgctcgctcaagcagttcatcccggtggtggcgacgttcagcctgttggcactggcggcgttgtacctgttcatttgcctgcaggcctcgattcgccgcagcgccagtggcatcactacgctggccgagtccctgcgcgacggtaacctgtgcgtggaagtggcggtggaaggccgcgatgagctcgcggccatcagcacggcactcaacgtggcggtggtgcagttgcgcaccagcctgctgggcgtgaaccacgagactcagcagcttggctcggcggtgctcacgctcaattcacagtcgggcagcaccctcacggaagtcgaagaccagcaacagcaaatcagccagattgccgccgccgcgactcaattggccgccacgtccatgggcgtcgccaaaagctgtgaacaggcctcgggcagcgcccagaacacccggcgcatcgcgcaagagagcagccgcgacagtcagcgcaccacggccagcatccagcagcttaaccagcgcctgacggacacggccaacgcactggaacaagtcagccagcagggcgagcagattcagtcggtggtcgacactattcgtggcatcgccgaacagaccaacctgctggcgctgaacgccgccatcgaagccgcccgtgccggcgagcagggccgggggtttgccgtggtcgccgatgaagtgcgcagcctgtcgcaacgcacccaggcctcgacggcgcaaatcgccggcaccgtagacagcctgcgttcaaccgtcagccaggccgtgagcctgatgagcgccgcatgcgaccaagcgctgaccgatgccgaatccgtcaccggtttgggggcacggctgggcgagatcgccggggctgtgcaaaacgtcactgacaccctggcgcagattgcggcggcggtggaggaacaagccgcgaccgccgacgaagtcagcggcaatatccagcaagtggaccaggccgcaggtcgcctgctcgacggcgcccgcgcagtgaaccaggcggccgacacgctgagcaaaggcagccgcgcattgagcgacaacaccgcccggttccggttggcctgatcaggggctcctggcgagcgggctccatgtggcaggcgggcttgttgtggtgagcggggcaagctcgctcaccacaacaagcccgctcaccctataaggcccacaaacgcgttaacaacttcagggcactccactgcgcgcgcgcagtctgctgatgtaccctcaacgctcgcccaatggagctgcccccatgatcaccgtccaccacctcaacaattcccgctcgcaacgcatcctctggctgcttgaagagctcggcctgccttacgacatcaaacgctacagccgcgacccgaaaaccaacctcgccccggcggaactcaaggccatcaacccgctgggcaaatcgccggtgatcgaagacggctcgctggtgttgatcgaatccgccgcgatcatcgactacctgattcgccgccacggccagggccgcctgcaacccgatccggccaccgccgcctacgacacatacgtgcaatggctgcacttcgcggagggctcggccatgttgccgctgatgctcaacctctacgtcggtcgcctgggtgacgccggtgcgccgctgcaaccgcgtatccagtcggaagtcgccaactacctgggctatttgaatgacgtgctggcggacaccccgtatctgctgggtgacgagctgagcggcgcggatatccagttgagctttattggtgaggtcgccggcgcacagggcaaattgcaggcgtacccgaacctggtcgcgtgggtgaagcgattccaggcgcgcccggcttaccgcaaggcggtggagcagggcggtgaatacgcgttcgctaaataacccgggcaaggggcaaacgagcccctttttttggcagttattggctttcgaagcgtttgagtgaaaacgaggaaaggtccaggtcactcgaaccgcgtatgcaccactgtgcgaacgcttcgcccaacgccgccgagtgcttgaagccatgccccgaacagggcgacaccaccagcgtgtgctgcagtgtggggtgttcgtcgatgatgaagtggtgatccggcgccacggtataggcgcaaaccgccgacttgacgaccttggcggtcacgcctgcgatacgcccctgcacctgctgttcatacatttcccgttcctgcaccgtcgagacggtgcggtccagtgtgtcgggcgtggagggggtgtgatactgcgccgtggcaatcttcaggctcccctcgccgggtaacgccgggaaaccgtagtgggtctggtctgtgccatgcgtgaggatgtaggtgggcgacttcccgaccaactcggcgcccggctcaagctcgaaccagaacagctgttgccggtaaacgctaagcaagcgatcaaacggcgctcccaacaaacctcccgcccaattgcccgcgctgaccaccagcttgtcggcctgcaacgtacgtctgtcggtggtcaccgttacgccgtgggcgtcggagctgatacgggtgacggtctcgcccttgtacagcgtggccccgttttgctcagccagcttcaattgcacatcaatgcagcgctcggggcgtacaaaaccgccttcgggttcgtagtaaccgatggcgctgtcgaccacctgggcaaactgggggaagcgccggcgaatctgcgcagcgtccagctgttcgtgtttgattccgtaggtttgcgccaggcttattgtgcgcagggtaaagtcggttttatcgccggggtcgaagtcagcgctggaggtcagcaccaacaggcccgactgctcaaacagtgcttcccccgacaacgcttcaagctcgcgccagatacggtgcgagttgcgcacaatgggcacgtactgcgcaccttcaccgaccgaaagccgtgtgatccgggtatcgccgtggctcgaaccccatgtatggggcgggtgatgacggtcaatgccggccacttttacaccggcctttgccagttgatagaccgtggccgcacccatggcgccgaggccgatgaccagcgattgatagcgttccaaggttgatactcgcgtctgggggagcggactagttgaggccaaggcgtaaaaaaaaacaatgaggatttgcgggtagcgcagctgttgagaggcgatgtgtagatcagccatagtgactgctggtctcaacccaggaagaagccgtgagcgtgccgcatcatgaacaaccgccgatagcccaccgactgcgcaaagcccttgtcaccgacctgcccttgatctatcggggtgagcgcgagtacatccagcgctgggagcccagccacgaagacggctggctgcgccagaccgagcggcaccttgcggattggataaaccacttcgaccgcttgattgtcgccacggttgatgagcagtttgcaggttattgcttgtggatgccgcaggacggctgcgcgctgctgtgtacgattggcgtcggggcgcaataccgtcaaaggggtttaggcgctgcgctgttgacggcctacgccagcgaagctggcctagcagggtttacccatttgacgttgagcgtgcgtgccgacaaccccgcgaggcggctgtatgaaggcgccgggtttacgcagacgggagcggacgccaatggctatttgaggttcgagctggagggttgacgctccccagagggccatgggatttttacccatcgtttagcgctgctgaaaggcaatcttcaaccccagccccataaacaacgtgccaatgattttcccctcccaccgccgcagcctcgcaagccccttgaacccccggctcagcgggcggatggcgatggccagcaggctggtgtacacggcgctgagcccggaaaaaatcaggcccagcaccgcgaattgaaccagcgacgagccggcttcggggtggacgaattgcggcaggaaggcgaggaagaaaatcgcggttttcgggttcagcacctcggcgcccgcggcctggaaaaatgcctggcgcggcgtgacggcgggcaaggccaagcgggtgtttgcgcccgactgagccatgaacgcccgtatgcccaggtagatcaggtaagcggcgccggcccacttcacggcgttgaaggctgtggctgaggtcatcaggatcgccgacaaccccagtgctgcgcacagggtgtgtacaaggtcaccgcacgccacgcccaggccggtcgccacgccgaccttgcggccaccttgaagcgtgcgcgtgagtaccagcaacacggaagggccggggatcaggaacaagccaatcacgaccgcgatgtaggtgatgagggaggcaggttcaaacatggcggcttatctcgacgcggggcttgggccacagtaatcctcagcctgcacctgaatgcaaccccgcgtcgatggcacctagccgagcttcacattcatggtgatgctcgcggtaaacaccttgaccccggcctcatcaaagatcgtcaccggcacgaacttgtcgccggcggtttcccagtcaatgcccgagccatcagccaccgcgcggatgttcgacttggctttggccagatattcgacggtcatgcccttgggaatccatttggcgcccgaggggattgatacatccgtcatcgtgccgcccgccagttcggcggcgttgcacagggcgatggcatgcacggaggccaagtggttggtgatctccttgcgaaacggcacgttgaccaccgcgtggccggggcgcagctcggagatttccggcgtgatggtgctgaaatacggggcgacctgacacgccatctggctgaacgcagccgggccgacgctattgaacatgtttaggaactggctcatggactatcctcgaaattggttaacagaataatattctgtaacggaacaatattccgccattccgaggagtgtcaagccatgccttctctgcgagccgatgtacctttagactccgctgatttggcgagcttgttcatgcacgcacctgatttgatcgaacgcaccttccccggccggcgcagcgagctcaagcgcagcatcctgcgccaggcgctggcgtgctttaacgaggtgggcatcgaagccaccaatatcgagaccatccgcgcgttatgcgacaccagcgtgggggcgatctaccaccacttcggcagcaaggaaggcattgttgcggcgctgttttttgccgcgcttgaggaccaggccgccctgcgtgaccagtttctgggcgacgcgaaaagcgcccgtgagggcgtggcggcgctggtgcgcagttatgtgcaatgggtggacgcgcaacctgactgggcgcggtttgtgttccagagccgctttgccgtggcaaacggtccgttcaaggacgaactgctctcccgcaaccagcagcgtaaccggcacatgagtgaatggcttggcgacgaaggccgtcgcgagcagttcagccatgtgccggcgcagttgctgttttcgctgatcatcggtgcggcggaaagctactcccgcgcgtggctgtctgggcgggtcaagaaaagcccggctgaatacgtcgagttgttggcgcaggcggcgtgggcgtcgatcgagaacctggaggcgccggcctgagacactgccggcgccgatcattcgtcagcgagcggctacccgaaacgagcgaaacgctctccacatttcttgcgcaaaaatctgcggctgttcgaacgccgcaaagtgcccgcctttttccaccgcattccaatagaacacgttggcccacgccgcctcagcccaggcccgaggcggcttgaaggtttcggccgggaaaatactcgcgcccatgggcacctcaatgcgttcaaccccaccccgggccgccgagaagaaatccgccccgcgaatggtcgcgcccacgccttcccagtagaggcgcgcgctggaggtgccggtgccggtaaaccaatacaacgagatgtcatcgagcatctggtcacgggagagggcgtcttccgggcggccgttgttgtcggtccattcctgaaatttttcgtacatccaggtggccagggcgatgggcgagtcactcagcccatagccgatggtttgtgggcgggtgttcatctggttggcgtaaccggccttgtcggacacgtaacgctcaatgtctgccagggcctggcgttcctcttcggtggggttggcggggagccgggccggcaccaccatcggtaaattcacgtgcgccgccatcagcccttggggggcctggcctgccagagcagtggtgatggccgcgccccaatcgccgccctgcgcgacccagtttttatagcccaggcgttcggtcatcaataccgcccaggcccgtgcgatacgcaccgggttccagccttgctcggtgggtttgtcggaaaaaccgtagcccgggatcgcaggcaccactacgtcaaaagcgtcttcggcgttgccgccaaacatcaccggatcggtcaggcgctcgatcacatccagaaactccgccactgagccaggccagccgtgtgtcagcagaatcggcgtggcattggggtgctttgagcgcgcatggataaagtaaatgcccacgccgtcgatgcgcgtgcggaactgcgcgaacgtattcagacgcgcttcaaaggcgcgccagtcatagctgttgagccagtaatccaccagcgatttggcggcgtgcaacggaacgccctgggaccaatcgctcaccagttcctggtccggccagcgcgccaggctcaggcgcagacgcaaatcatccagggcggcctgaggtacgttgatttcaaaggcagtcaccgcttcggtggcgggtggcaataccagcgcagtgctgtcgttaaaggcgggcaaataaggggtagcgagcattgctttctccgtgaaccattgattgtagcgatcgctacaaaatagctcgggcagaaatgccgcgtcaatgatattgtatcggccgatacagaaacgacaggtgagccccatggcgagaaaaattgcattcgattacgaccaggccgtggacaaggccaaggtgctgttctggcagcgcggctatgtcgccacgggcttgcgtgacctgctgaaggtcatggatatcggcgagagctctttctacaactccctcaaaagcaaaaagcacctctacctcgcttgtgtgcagcgttacgaagatgacgtggtggcccggcgcctggaagcgctggtgtctgcccccactgctgccgccggcatccgggcgtttttcacggccatcctcgatgacctcgataccgcgcaactgccatcacccttgtgcatggttgcggccatggtcaccgatgtggtgctgtccgaccctgaactgcgcgagcgcgccgaacaagggctggaggcggtgcgcgggatcatgtgtgagcgcttgatcgaagatcaggccaacggcgtgctcccggcttcgctggacccgcaggtgaccgcctcagtgttgctgacctacctgcaaggcctgtggcgcatggcgttggtgaagtttgaaaggcccgtgtttgagcagcaagtgaccgcgtttctgcgcgggatggggctttaggcgcgcattacttgtgcgccaggcgtcggcgccagtcaccgccgtgctgagcgtggcattcttcttccgagtcaaaacgcacgcaacgctccatcggcatcggggccacatcggcttcgagcagggcggcggcggtcaactcgcgcatgcgttggtcggcgcccgtcgaaagagcatggtccttgttggcgcgagtatcgaacacccaggtgatgcgcaggctgtgggggaaggcggcgtaatcgacggtgtgagtcagccagtcgaaacctggaatttcagccttggcggtttcacaggcgtcggtcaatgtggcgaccaggcggcgttcgaggcgggcgttgtcgcgtttgggtgaaggcatcaaaactccggcgtttgttgtcatttcaagtgtttccaaataaccctatcccattgttcactcagggtcattctggaaaaaccagccttcagccgcacaaaagctgaacaccgccgaacatccgcccacttcgcgtggtccgagctttactgataatctgctactagctcaatgccagctccccaggggcctccatgaaaaccttgcgcaccgccttcccggccgcgtttccccgcagcgcctcccgcgcctcggaaacagctctctcagacatcgaatttctgcatcgcatcagcctcgacctgatcggcgaacaggacctcgaagccctctatgccaagattgtcgatgcggccgtgtccatcaccggttcgcagtttggcaccatgcagatgctgtgcccgcaagggcatgcgtccgggcacgatggcgagttgcagttgctctgttcccatggcctgccgcccgaagccgtcggcttctggcaatgggtgagcccctttgcctacagcagttgcaccatggccctcaagctgggccagcgcgcaatcatccctgacttcgaacagtgggccgacattgccggcaccgaagacttgcaagccttccgccgtgcgggcatccgcgcggcgcagaccacgccgctgcgctcgcgcgatggtcgtttgctcggcatgatttccacccactggagccagccgcaccagccgtccgagcgtgacctgcgcctgctcgacatcctcgcgcgccaggccgccgacctgctggagcgcacccaagcggacgaggccctgcgcgaaacccaagcccagttgcgcgcgctcaatgaaaccctcgaacagcgcgtggccgaacgcaccgccatgctgatgcaggctgaagaaaagctgcgccaatcgcagaagatggaagccgtcggccaactcaccggtggcctggcccacgacttcaacaacttgctggcgggcatctccggcgccctggaactgatgaaccgacgcattaaccaaggccgtctcagcgacgtggacaaatacatggtcgccgcccaaggcgcagccaaacgcgccgccgtgctgactcaacgcctgctggcgttctcgcggcgccaaaccctggagccgcgcgccaccaacgtcaacagccttgtgtacggcatggccgaactgatccagcgcaccgcaggccctggcatccagatcgaaaccctcggtgccgccgatgcctggaatgcttttgttgatgccagccaactggagaacgcactgctcaacctgtgtatcaacgcccgcgatgcgatgcccgaaggcggccgtatcacccttgaaacagccaaccgctggctcgaccacagtgctgcccgcgcctttgacctgcccgaaggccaatacctgtgcctgagcgtgcgcgatacgggcaccggcatgccgcctgacgtgcttgcccacgccttcgagcctttctacaccactaaacctatcggccagggtaccgggctgggcttgtcgatgatctacggctttgcccagcaatccggcggccaagtgcacattcactcccacgtgggcgaaggtacctgcgtcacgctctttctgccgcgccatcatggtgccgcagctttcgacgaacttgcccccgggcaagctgaaatcgaaggggctcagcacggtgaaaccgtactgctggtggacgacgaatccaccgtgcgcatgctcctcgccgatgtgctcggcgaactcggttacaccgtcatcgaagccgccgacagcgccgccggcctgaaactgctgcgctcggatgtgcacatcgacctgctggtgaccgacgtcggcctgcccggcggcatgaacggccggcaaatggccgaggcaggcatggaactgcggccggggttgaaaacgctgtttatcacgggttatgcggaaaatgcagtgatggggtacgaacaactaggcacagggatgggcgtgttgaccaagccgtttgcagtggaagtgctggggggcagggtaagggagttgttggggcggtaggagggcgagtccatctttaatagacccgcccctctctgttacggcagcaccttggcaatcgcgtcaaacgcgaccatatcgtcgatcacctcgcccccagtgggtttggtctgcgcttgccacgccacaatcaccaggtttttggtcgggttgatatagatgaactgaccaaacgtaccggctgccgtaaaggctttatcggccttggaagccgctgtccagcccggccaccacatggaggcaaactcaccgtcctcctcggttttgccggtggtcgcgctggcgaaactcaaccagccttcaggcagtatttgctgcccacccgccttgccgccgctgagtacgaactggccaaaacggccgtagtcttccagggttgcgctgatgccgctgccgccgacctcattgccgttggtgccgtcgagccaccacttggcgtcggtctgcatgccatagggggcccagattttctcgctcaagtattgcgtcagcggtttgcccaccgccgagctgaccaactgccctaatacctgcgtttcaccggtactgtagttggtgcgcgttcccggcggcgcggcagtggaaaggcttgccatgaacttgagcatggagccggacacctgttcgctgcgcaacttgatcaagtggcgttcgtccgaggtggggtcggtgtatttctcgttccatttgaccccggaacgcatggccagaatctgccgcacggtgacctggtcgtacgcgctgcctgtcagcgaaggcaaatagcgggtcaccttgtcatccaggctcttgatggacccatcctgcagcgccgcacccaccagggtggacgtgaccgacttggccaccgacatggacatccagcgcgtctcggccgtattgcccttctcataacgttcatcaacgatcttgccgtccttgagcaccaacaggccggttacatggttggtcgccacgtagtcgtcgagggtgtagtgcttgcctttgaagtcaaaggccaccgggggcaggggctggctgctgcgcggcagcgggaaagggtggccccccgccttgattgtgcgcaccgggaacaagcggtcggtattgcggaaggtggtgaccgccagttcttcgctgagcctgccgtcaaaaatggtttgtacgtcgccaatcggctcctgggcgtgcgggtagggcttggtggcgtcggggtgggtggcgcacgcggacagcgaaagcgcgagggttgcagcgcacgtcagtaggtgaagagggtggagcttgaagcgcgataaagggcgagggagtgcgggcataagaacctctttgattatttttcatcggtcttaaacggcgttgcgcacgtccgaaggaaaacgtgccaaggagaagcatgcgatgggcgattttttttggcgcgcgggatcgggacgggttttgcgtgggattgggccgtgggcagaagcttctccaacgggccttatatccatcatgaggagggctaaaggtttagtgaaatcaattcattttctctcgaacagttgctcagcctaaaatgcaccttaattaaagaacatataaatattcttgggtaagaccgcagagatagcgtgggagcatttcaaggaccacgcaattgaggtgttatctcgatagtcagggtgtcagattacaatgagtactgatttttcattttcgattaaaagcatcggtttcgacgaggattatcatccttcggaaaatacgcgcatcacgactaacttcgccaacctggccagaggggcaagccgtcaggaaaacttgcgcaacaccctgacaatgatcgacaaccgcttcaatgccctcgcgcactgggataaccccagggccgatcgctataccgtcgaacttgaaatcatttccgttgagatggacctggccgtcgaaagcagtggtactgccatcccgctgattgagatattgaaaacgaccattgttgatcgagcaaccggtgaacgtgttgaaggtatcgtcggtaataatttttcctcctacgttcgggattatgacttcagtgtggtgttgctggagcataacaagggcaagcctgaattcggcattccagagggctttggcgaattgcatggcaagctattcaagcattttgtgaattccaaagcctacacggataatttcaacaagccgccggttatctgcttgagtgtttcaagtggcaaggtctatcaccgcactgaaaacaggcacccggtattaggtgttgaataccagcaggacgaatactcgttgaccgatgagtacttcaagaagatgggcttgaaagttcgctatttcatgcctgccaacagcgttgccccgctggcgttttacttctccggtgatttgctgggggattacaccaaccttgagctggtcagtaccatcagtaccatggataccttccagaagatttaccgccccgagatctataacgccaattcggcagcaggaaagtcttatcagccgagtttgaaacatcaggattattcactcacgcttattgtttatgatcgcgaagagcgtagtcggctggccattgaacaaggcaagtttgttgaagagaacttcattaagccgtaccagacggtgcttcaacaatggtccgcccaccacgcgctctgattcatttaaaagacaaggtcatctgttatgaaaaagctgttacccacttccactgccggtagtttgcctaaaccgtcctggctcgcccaacctgagacgctgtggtcaccctggaaattgcaggaagcagaattggtggagggcaaacaggatgcgttgcgcctggccctgcaggaacaacagcaagccggtatcgatatcgtcagtgatggtgagcagactcgccagcacttcgtcacgaccttcattgagcacctcagcggcgtggattttgaaaagcgtgagaccgtgcgcattcgtgaccgctatgacgcgagcgtgccgacggtgatcggcgcggtcactcgccaaaagccagtgtttgtggaagatgccaaattcctgcgccagcaaaccgatcaacccatcaagtgggcgctgccaggccccatgacgatgattgatacgctctacgacaaccactataaaagccgcgaaaaactggcctgggaattcgccaagattctcaaccaggaagcccgggagctggaagcggcgggcgtggatatcattcagtttgatgagccggcctttaacgttttcttcgatgaagtgaacgagtggggcgttgccaccctggaacgggcaatcgaagggctcaagtgcgaaacggcggtgcacatttgctacggctatggcatcaaggccaataccgattggaaaaagaccctgggttcagagtggcgccaatatgaagaggcgtttcccaagctgcagaaatccagcatcgatatcgtctcgctggaatgtcataactcccacgtgccgatggagctgattgagcttattcgcggtaaaaaagtgatggtgggggccattgacgtggcgtccaacctcattgaaacgcctgaagaagtcgccaataccttgcgcaaagccctgcaatttgtggatgccgacaagctctatccgtgcactaactgtggcatggcgccgctttcccgtggggttgccagaggcaagctgaatgctctgagtgcgggcgctgaaatagtccgaagagaactctcgaactaagtattcaggatttaccatgtcacttcccactacggctatcgagcccttgaactttcgcgaagcgctcgggcactacgcgtccggcatcacggtgattacctcccaagtagatggcgagccgattggtttcacgtgccagtcgttctacagcgtctcggtgagcccgccgctggtgtcgttcagcgtcatgtgcagctcggccagctatcccaaaatccggcaggccgggcggtttgccgtgaacatcctgtcgggtgagcaggtggggatttccaaccggttcgcccggcgcggcacagacaagtggcagggcgtcgactggcaggcgtcgccgctgggtaaccccatcatcggcggcagcctacactggctggattgcgaaattcacgccgagcacgttgccggtgatcacctgatcgtgattggtgaagtgaaagcgctgaacctgcaggaagccgctgcaacgcagcccttgctgtatttcaaggggcaatattgcaacctcgccacgcatggcgctgtttgagtctttaccggagcacgttgccgtgctccggtttttgtgcccgaacgtcttgcagattgcagcccgtcacggctctcggcagtaaaccagccccttttctcatcaaacaggtctaccatgcctccccggcagtggttccacgcgctaccgactcttcttattaaaggtaccgccatgtccatcgaccaaatttcccttcccaaaggcgtaggccctcacgccgccaagctgctcgacgccatcaccggcgccgccacccatgaagaactcaaccgcgcaggcgggaaagccgagggttttgtgttggggctggaagccagcaaggccatcaaaagccagatcgctgaatcgttgtatgtggcttacgatgacgcggcgagtcatcgtgaaggtgagctgaagggctgattttcaatcagggtgatgccgcgtggttatccactcaggtcttcacacagatcgagccgcaaggggctggtgaaggtttcgtagcgatgggtgatcaatgtgccaaggaagatcaaagtacatgccctgcatctggcccagcgactggttgagtcaggttggaccctgaaacacgagttcaaggctgaaaatgtaacctacgagtggtatctggagtgggagcatgccggagccccgccgacattcaaggacgcataaacatgacattgaccgtcaacaccttcctcgaactggccatggccaaccccgtcaacgccgaaatcatcgcgcgcctgccagccctcggcgtgagccagtgcatgctcacggcgggttgtctgtttcaggcggtgtggaatcaccaggcgaatttgcctgctgatcagggcgtgaaggattacgatgttttttactttgacaccgacctttcctacgaggcggaagacaaggtcattcgagcggctgagcatttgtttcaagaccttggcgtcaatgtggaagtgaagaatcaggcgcgggttcatctttggtatccccagcgcttcggtcggccctatccgcaattgcacacggctcaacagggcgttgaccgttacctcgtcgcgggtacgtgtatcggtctggagatagacacaggcgaggtgtatgcgccgtacgggttggaagacgtggcgcagggtattttgcggattaatccgctgcaccccgagcctgaattgttcgcggcgaaggccatgagttatcagtcgcgctggccgtggctcagaattgtgatgccgcaagcagtttagcgatgcaggctttggcggttggcagtgaatgcgcggtgatcccttcgcagcctcgccgtggctcgacagctcccacagggatcggcggtggctgaaaaatcattatttccacgtcgctggcgccgagcactttccactaaacaatgaagctccaatgtgggagctggcttgcctgcgaagacggcggcattgccgatagaggtgccgcctgtgccgccaccttcgcagcctcgccaaggctcgaccgctcccacaggggatcgcagtgaacttttacctgcgtgttgggcgtccaagcttgaaatgatcaactgagcacagacgatgaccttctttatcttcctgctagcctgcgctgccgctgcgagtaccggcattctcttcaagccgggcgcttggtacgaggcgctggttaaacccggcttcacgccgcccaattggctgttccctgtcgcgtggacgattatctatttgttgctcgcctgggccggttatcggttaagcctgataccggacagccaggccgtgctggcgttgtgggcggcgcaaattgcgttgaacacgctgtggacgccggtatttttcggtgcgcatcgcatcttcgcggcaatggtggtgatcacgctgctttgggtgaccgtggcgaccatggtggtgctggccgtgcgcctggatttgatcaccgggttgatcctgtttccgtacctggtgtggctgagtgtcgcggcagcattgaatttctcgattttgcgcaataaccgctgatggcccataaaccctggcctgccagcgagcccgagctggcgcagatgcgcacattcaacaaaaaactcgcgtggatgccgcgcttcaagatccgtaaccgcattacgccgcgtttgatccaggcgctgctgcgcgtcagccaaaaggtcaggaaaccctttgcggcgcaaacccggttgatcagcgcaggcggtgtgcaagtgccggtgcgtatcctgcgcccacaaggcaaacccaaaggcgtggtgctggacatccacggtggcggctgggtgatcggcaacgcgcagatggacgatgacctgaacatgggtatggtgcgggcctgcgacgtggtcgtggtgtcagtggattatcggttggcagtcgacacgccggttgaggggttgatggaagactgtttggcggctgcacgctggttgctgagtgagacggagtttgctgatttgccggtgatcgttgtcggcgagtcggcgggcgggcatttagcggcggcgacgttgctggcgctcaagcaatggccgcaattactcgcgcgggtttgcggggcggtgctgtattacggcgtatacgatctggccggcacccccagcgtacgcacggcggggccggatacgttgcttctggacgggccgggaatggtcgcagcgttgcaattgctgacgccgggtttgagtgatgagcaacgtcggcaaccgccgctgtcacccttgtatggcgacttcacggacctgccgccggcgttgatgttcgtgggcgaattggacccgttgaaggatgatacgctgctgctggctgaacgttggccgcaggccgaggcgcatttgctgccggaggctgcccatggctttatccattttccggtggcgatgggcgccactgtgttggcttacagccaccagtggattactcggcaaatgctcacgcctgctcttgatggctgaccaacaaggcctgccaggccaagccaagctggaccagtttctccaccgggaaaggcgcagaagtgaaccgcaaggaaatgggggttatgtagaggatgcgcagatgtatttcgccaggctttttgctttttaccagtgacagccggttccagatgaagcgggcaggtttccacttcaccacgcgactcggagctgaagccgtaaaaaaagctgacaacctgggggcgtctgcggcctttataaaaaggtggaagttgcccgtactgccttgttccatggtcaggtaaaagtcttgctttctggattgcaagaacaggtaaacacagcgccagccgctttcatggcaaacactgaacaacgcttttgcattgatcatggttgaagtcttccgtgacggggttccgtgaggtgtagctgataccgcgcaggtttgcacgtgcaggggctcaggctcaatgccaccgccttcgcaggcaagccagctcccacacggatttgcgcttgatctgtcagatggggcgcagccgcagtatctgcgcgccgtcaaacgggtctgtcaggtaatgcgcctgcacgccaaacgtgtcgcgcaagcgttctggcgtcagcacctccagcggtttacccagcgccactaaccgcccgtgatccagcacggccagccgatcacacgtcagcgcctgattcaggtcgtgcagggcaatcaaggtggtcaccggcagcgcttgcacgcctttcaaaatccccaactgatgctgaatgtccagatgattggtcggctcatccagcagcaaaatctgcggccgttgcgccaaggcgcgggcgatgtgtacgcgttggcgttcgccgccggagaggctgcgccaggcccgctggctcaggtgggtggcgtctacatcgtgcaaggcttgatgcacgatggcgtcgtcttcggcggaccacgggctcagcgccgacaaccacggcgtgcggcccaaggccacggcgtcgaacacgcgaatggcgtcgtcagtgtcggcctgttgttccaccacggccagttgttgcgcgatggcgcgacgggacaaattccccaggcgctgcccgcccagcagcacttcaccggacgccggtgtgcgcaagccggcgagcaatttgagcagggtggatttgccggagccgttcggcccgacaatccccagtgtttcgccggattccacctccaggtggataccgcgcagcaactcggcttcacgcaccttgaagcccagcccgctgcagctgagcacgctcatcgcgcattcctccggccgatcaggatcagcgcaaacactggggcacccaccagagcggtgaccacgccgaccggaatcacctggcctttgatcagcgtgcgcgacagcacatcggcggcaatcaggaacaatgcgccgcccaaggcgctggccggcagcaagcgcgaatgcccggtaccgagcagcaggcgcgcagcgtggggaatcaccagcccgacaaagccgatggagccgacaatcgacaccatcaccgccgtcaccagtgcggcgcaggccaccaataccagctgtacgcggcgcaccgggatacccagggaggccgccgaatcagtgccgaaagtgaacgcatccagcgcgcgacggtgccacaggcacacggccaagcctgcgaccgccaccggcactgccagccacaccgacggccagcgcacgccgctgaggttgcccagcagccagaacatgatgccgcgcgcctgttcggaactggcggacttggtgatcaggaacgcggtgagcgcgttgaacagctgcgaaccggcgatacccgcgagaatgatttgcccggtgccgctggcagaaccgctggcccgcgccagcagaataaccaaggcaaatgcagccatcgcgcccacaaacgcgcccgccgacaacgaaatcaaaccgccgccgacgccgatcagcgcgaccagaacagcgccggtggaagccccggcgctgatgcccaataagtacggatccgccaacgggttgcgcaacagcgactgcaggatcaccccgcacgtcgccagcccggccccgcacgcggcggccaccagggcgcgcgtcaggcggtagttccacaccacgccttcgtcgatggggtcgagtacatagccggcagcccagagtttgttggccagcacttgcagcaccacctgtggcgagatggcggtttcgccaatggccacgccagccagcacggccgccagcagcaaggcgagggcgagcagggtgcgcatcatttgggcaggtcgtagccgtcgatggccgaggccagttgttccaggccatcgaacatgcggatgctggcctgcaacgccagggcgtcgaggatgatgatgcggttgtttttcacggcgtccatattgcgtgtcaccgggtcgctgcgcaggaaggcgagtttcttttcatggtcgtcggcggggtagcggcgccggtccatgcgcgcgatcaccaggaaggtcgggttggccttggcaatggtttcccaaccgacggcgggccactcctcatcggactgcaccacgttggacaggccgagggtttccagcatgaattcgggaatgcccttgtggcccgccacatacgggtcgctggccatctcggagctggagaaccacaccagcgcgctggcgtgcttgaggcctttgccttgtgcggtggcaaccgacttggccaggcgcgccttgagctcgtcgttcaggtgttggccacggtcttgtacgtcgaaaatttccgcgagctggctgatgcttttatagatcgtctcgatatggaacggctcaagacgggtgccatcggcgcccaccaagttgtccttgccttcgcagtcggagggcagcaggtaggtggggattttcagttcgtgaaactgctcgcgggtgccgaccacaccttgggggccgaccacccattccagttcggcggccaccagttgcgggcgtttggcgatcacggcttcgaagctcggctcgttgtcggccaggcgctcgatcttgtcgttctgcgccttgaactgtggcaacacgctgttgaaccacaacgaggtgccgaccactttatcggccacgcccagggcgtagagtatttcggtggcggcctggccgatggtcacgctgcgcgccggtgcctgctggaaggttatcgtgctgccgcagttctgcacggtcagcgggtaatgggtgggtgcagcctgggccagggcgcagaagccaacacctgcgagcaggacggtaacgcgtggcagcatggggcaatctccgtgagaaccgtaggtgaagcgggagaggtacggttcggaaacacaccctcagaggctgcgggtaaggcaggcgaggacgtccttcccggacaccccgccggtcagtgataacgctgggccggcaggtctcctgactgatgcgtcgtcgccacgctccggccttcccgagcgcagctcagtggcgttttggagcaggctcagcacctacagttgcgggggcagtttcgattgacgtcgcgcgcggcgtttcgaattccctattagtcccgtttgggaaccggcgcggtatggtagtcgattaggatcagtgaggggagtttcttaaagatggctcagtgatatcatctgccgcgttcatgccccttgctcatggagagcctatgcactttcgccgtgttgtcgcgttgactcatttgtccgccgtattgctgctttcgggctgtgcccaatcggttgcgccgcctgcggcggttgcccctgtacagctggaagccctgggccagccactgccctcaagccctgcgcgcgcggggtggatcgaccagattatcaagcaggatccggtggtggtttcatcgctcaaaccggtgttgaaaccggcggtggataacgatgagcgcatcgcccggctgcgcaaacaggatggcggcgtgttgccggatggctactgggcgctctacaaacaaaatctggaagccatgcagtacgacttgaatcaccagcacgatgcagcgcgcgagcaatacacgcaggtttaccgggatgaattgggccgtttgagtgattcgacgctgcaggccatggccaccacaccgcaggcggtggatgccggtacccggcgccagctgagtgcgcggatgagcgaccgcatggtgaactacatgaccaccagcgagcaggcattcaaaggcgccacggatgcgcaccttaaccgcatggccttgatggaccgacagtacaacgtgtgcgcgcgcaagcccgattgctgggatgcgcccgtcaaaaagtgaagtgcccgtttgaccccgtggcgagagagcacgctccctcgccacgggagcaggtttgacgttatttgcgatccagccacaccgtctgcgcattgcagaattcccgcacgccgaagtgcgacaattcccgcccaaagccactcttcttcacaccaccgaatgccacccgagggtccgacacgctgaacgcgttgacgaagatcccgccggtttccagttggtttgcaatatcacgcgccttcgcagaatccgtggtgaagatgctcgcggtcaggccgaactcgctgtcgttggccaaggccacggcatggtcggcgtcacgggcggtgatgatcgaggctacggggccgaacagttcctgtttgaatgaggtcatctggtcggtcacgccggccagcacggtcggctcgtagtagttgcccgcgccgggcactttgttgccgcccagcagcagggtcgcgccttcttccagggtggcctggacctggccgtgcagttcgtcacgcaagtcgaagcgcgccatcgggccgacgtaggtgcttgtcgacgtcggatcgcccatcaccagcgcgcggctggcgtcgaggaatttggcggtaaaggcttcggccacgccggcttcgatgatcaggcgcttggcggcggcgcagacttggccactgttctggaaacggccgatcagcgcggcctgcacggcggcgtcgaggtcggcgtcgttgagcacaatgaatgggtcggagccgcccagttccagcacgcattttttcagcgcggcgccggcctgggagccgatggcgataccggcgcgcacgctgccggtcagggtcacggcggcgatgcgtgggtcggcgatggctttagacacgccgtcagtggtcacgttgatcacttcaaacacgccttcggcaaagccggctttgtggaacgcttgctggatcaggtaggcgctgcccatcacgttcggtgcgtgtttgagcacgtaggtattgccggcgagcagagttggcacggcgccgcgcagcacttgccacaccgggaagttccacggcatgacggcgaggatcgggcccagcgggcggtattcgatgtgggcggtgccgttgtccaccagggtcggctccggggcgagcatggctgggccgtgagtggcgtaccactcgctcagttgcgcacatttttcgatttcggcgcgggcctgggcgatgggcttgcccatttccagggtgatcatttgcgccatgtcttcagcttgctcacgcagggcggcggccagggccagcagcagttctgcgcgttggctcaccggctggcggcgccaggtgcggaaggcgccagtggcgcggttgagggtggcgtccaactgcgaatcggtttcgtaggggtagctgccgacggtttcgccattggccgggttgatcgagagggcgtgggtagtcgcgttcatggcaccgtcctgcgcagtgatttaagttgcgttcagcgtacggggctatctcttttctggaaactgaataatattaagcaatacattcacgattggagaatgatttggacttggtgcagctggaaattttcaaggccgttgccgagcaaggcagcatcagcgccgccgcgcaattgattcatcgggtgccgtcgaacctgaccacgcgcatcaagcagttggagcaggatcttggcgtggagctgtttatccgcgagaagagccgcctgcgtttgtcgccggccgggtggaattttctgggttatgcgcggcgcattctcgacttggtgcaagaggcccgcgccacggtggcgggggaggagccccagggcgcgtttgccttgggctcgctggaaagtacggcagcggtgcgcattccggccttgctggcggcgtataaccagaaacacgccaaggtcgaactcgacctgagtaccgggccgtcgggcacgatgatcgaaggcgtgttgtccgggcggctggcggcggcgtttgtcgatgggccggtgctgcatgccacgctggaaggggtggcggtgtttgaggaggaaatggtggtgatcgcgccgctgcatcacgcaccgatcacccgggggcaggacgtgaacggggaaagcatctatacctttcgttccaactgctcgtaccgccatcacttggagcgctggttttcacaggatggcgcggtgccgggcaagattttcgagattgagtcctaccacggcatgctcgcgtgcgtcagcgccggtgccgggctggcgctgatgccacgcagcatgctggaaagcatgccggggtatgcggcagtgagtgtgtggccactgacggacaacttccgcattctgcatacctggctgatctggcggcggggcacggtttcgcagagtctcaacagcttcgtaaagctgctggaagaacgcaatctggtcgcaacttgaatccagtgtgggagctggcttgcctgtgatccagacacctcagtcattcagccggatcgaggtgatgcaatcgcaggcaagccagctcccacatttttgatcttcaatcagccgccgaactggaaggtgcccatcgccagtttcgccatgagggccgtcgcgcccaattgcaccagccacagcgccaggccgccgaggaatacgccaagggccacttgcagcaccaggctcttctggcgcttggcttgcggggcgcgcggggtgaagtcatgcaactcgtcgcggtcggcgcgcaggtccaggtcgtcgtttctcataaggctctcacagcaaaggggcagtcggggtttagtctagtgggttcgccaacaaaaaggggaagccattggcttccccttttcaccaccgcaaaggcttacaacaccttaacaatcgcctcggtcacagcgccgatgttcgactgattcagcgccgccacacagatacgcccggtgtccagcgcgtagatgccgaactcggtgcgcaggcgggtgacttgtccaacggtcaggccggagtaggagaacatcccgcgctgacggccgacgaagctgaagtcctggcctggggctgccttggccagggtggcgaccatttgctcgcgcatgccgcggatgcgcaggcgcatttcggccagttcggcttcccactgggcgcgcagctcaggggtgttcagcactgctgccacaatcgccgcgccgtgggtaggcgggttggagtagttggtgcggatcacgcgcttgacctgggacaggatgcgcgcgctttcttccttggactcgccaacgatggacagtgcgcccacgcgttcgccgtacagcgagaacgatttggagaacgagctggagacaaagaaggtcaggcccgactcagcgaacaggcgcaccgcagcggcgtcttcatggatgccgtcgccgaagccctggtacgccatgtcgaggaacggcaccaggtttttcgccttgaccacgtccagcacgttttgccagtcggccggggtcaggtcgacgccggtcgggttgtggcagcaggcgtgcagcaccacgatggactgtggcggcagggcgttgaggtcttcgagcaggccggcgcggttcacgtcgtgggtggccgcgtcgtagtagcggtagttctgcaccgggaaaccggcggtttcgaacagggcgcggtggttttcccagctcgggtcgctgatggcgacgacggcgttcggcagcagttgcttgaggaagtcagcgccgattttcagcgcgccggtgccgccgaccgcttgtacggtggtgacgcggccggctgccagcagtggcgactcggccccgaacagcagggtttgcacggctttgtcgtaggcggcaataccgtcgatcggcaagtagccacgggcggcgtgttgcgccacacgaatggcttccgcttcggcaacggcacgcaagagtggaatcttcccctcctcgttgcagtaaacgcccacgccaaggttgaccttggtggttcgtgtgtcggcgttgaatgcttcgttgaggcccaggattggatcgcgtggtgccaactcgacagcggaaaacaggctcattttgcggcagctctatgggggatagaagggacgtgtcgcgctccagccgaatgcactagagcggtgcacaaacggggagctagtatagaggccctcaacgccgagggcgaccacagaaacggcttttcgaccaagtttttcggtttatttgttgaccgttagtcttattgcaatgttgatctgtggcagcgggaaaaacgatggccttgaaacccgtcacattcggcaccacttctacagctatcatggttttttcctgcaacctgcgaagacaattcgcgggtcgctgagcttttttcgtcctggtgcggttccatccggggtgacttgaaagaggtacgtaatgtcggatttccagctcgtcacccgctttgaacccgccggcgatcagcccgaagccattcgcctgctggtcgaaggcatcgatgccggcctcgcgcaccagacgttgctcggggtgaccggttcaggcaagaccttcagcatcgccaacgtgattgcgcagaccaatcgcccgacgctggtgctggcgccgaacaaaaccctggccgcccagctctatggcgagttcaaggcgttcttcccaaacaacgcggtggagtacttcgtttcctactacgactactaccagcccgaggcctacgtgccatcctccgatacctttatcgagaaggatgcgtcgatcaacgaccacattgagcagatgcgcttgtcggcgaccaaggcgctgctggagcgcaaggacgcgatcattgtcaccacggtgtcatgcatctacggcctgggcagcccggaagcctatttgaagatggtgctgcacgtggaccggggcgacaaactcgaccagcgcgagctgctgcgccgcctgacgagtttgcagtacacccgcaatgatatggattttgcccgcgccaccttccgcgtgcgcggtgatgtgattgacatctacccggccgaatccgacctcgaagcgatccgcattgagctgttcgatgacgaagtggagagcctgtcggctttcgacccgttgaccggcgaggtgatccgcaagttgccgcgtttcaccttctatccgaaaagccactatgtgaccccgcgtgaaaccctgatgggcgccatcgagggcatcaagggcgagttggtcgagcgtctggattacctgcgcgccaataacaaactggttgaagcccagcgtttggagcagcgcacgcgcttcgacctggagatgatcctggagttgggctactgcaacggcatcgaaaactactcgcgctacctctcaggtcgcgaatccgggcaggcgccgccgacgctgtttgactacttgccggacgacgcgctgctggtgatcgacgagtcccacgtcagcgtgccgcaggtcggcgcgatgtacaaaggtgaccgctcgcgtaaagaaacgctggtggagtacgggttccgcctgccgtcggcgctggataaccggccgatgcgcttcgacgagttcgaaggcatcagcccgcagaccatttttgtctcggccacgccgggtaattacgaagccgagcatgcagggcgcgtggttgagcagttggtgcgcccgaccggcctggtggacccggaaatcgaaattcgcccggcgctgacccaggtcgacgacctgctgtcggaaatcaccaagcgcgtcgccctcgaagagcgggtgctggtgacgacgctgaccaagcgcatgtccgaagacttgactgactacttggccgaccacggcgtgcgcgtgcggtacctgcactcggacatcgacaccgtggagcgcgtggaaatcatccgtgacctgcgcctgggcacctttgacgtgttggtgggtatcaacctgctgcgcgaaggcctggacatgccggaagtgtcgctggtggcgattctggacgcggacaaggagggctttttgcgctccgagcgttcgctgatccagaccatcggccgagcggcgcgtaacctcaatggccgcgcgattctctacgcggaccgtatcaccggctccatggagcgggcgattggcgagacgcagcgtcgtcgcgacaagcagatagccttcaacctggaaaatggcattacccccaaaggtgtgttcaaggacgtcgccgacatcatggaaggcgccaccgtgccaggctcgcgcagtaaaaagcgcaagggcatggccaaggccgccgaagaaagcgccaagtacgagaacgaactgcgctcgccgagtgagatcaccaagcgtatccggcagctggaagagaagatgtaccagttggcgcgggacctggagttcgaggcggcggcgcagacgcgtgatgagattggcaagttgcgcgagcgtttgttggctgtttgatttgtagtgattggattggcctcatcgcaggcaagccagctcccaccttgaactgtgaacgcggtcaaaatgtgggagctggcttgcctgcgatgggggcgacgcggtccatcagagtcacccaagctggagcccaaccacctggggctgttaccattcgccccttgtttcaattttcagttttatcgcccattcgagacctgccatgaccaccgtccgcacgcgcattgcgccatcgcctacaggcgatccccacgtcggcactgcctacatcgccctattcaactactgctttgccaagcagcacggcggtgaattcatcctgcggatcgaagataccgatcaactgcgttcgactcgcgagtcggaacagcagattttcgatgccttgcgctggttgggcattacctgggcggaaggcccggacgtgggtgggccacacggtccgtatcgccagagcgagcgcagcgacatctacaagcagtacacccagcaactggtcgacatggggcatgcgttcccgtgcttctgcaccgcagaagaactcgaccagatgcgcgccgaacaacaggcccgcggcgaaaccccgcgctacgacggccgtgcgctgttgctgtcgaaggaagaagtggctgcacgcctggccgccggcgaacctcatgtcatccgcatgaaggtcccgagcgaaggcgtgtgcgtggtaccggacatgctgcgcggtgacgtcgaaatcccgtgggaccgcatggacatgcaggtgctgatgaaaaccgatggcctgccgacgtacttcctggccaacgtggtcgacgaccacctgatgggcatcactcacgtactgcgtggcgaagagtggctgccgtcggcgccgaaactgatcctgctgtacgaatacttcggctgggaacagccgcagctgtgctacatgccgctgctgcgtaacccggacaagagcaagctgtccaagcgcaagaacccgacctcggtaaccttctacgagcgtatgggcttcatgcctgaagcgatgctcaactacctgggccgcatgggctggtcgatgccggacgagcgcgagaagttctcgttgcaggaaatggtcgacaacttcgacctgtcccgtgtgtcgctgggcgggccgatcttcgatatcgagaagctgtcgtggctcaacggccaatggctgcgtgacctgccggtggaagaattcgccagccgtgtgcagcagtgggcgttgaaccccgagtacatgatgaagatcgcgccgctggtgcagggcagggtggagacgttcagccaggtcgcaccactggccagcttcttctttgccgggggcgtgaacccggatgccaagctgtttgagtcgaagaaactctcgggcgatcaggttcgccagttgatgcaattgattttgtggaagctcgaaagcctgcgccagtgggagaaggatgcgatcaccgcgacaattcaggcggtggtggagtccctggaattgaagttgcgtgatgccatgccgctgatgtttgccgcgatcaccgggcaggccagctcggtgtcggtactcgatgcgatggaaattctcggcccggacctcacgcgtttccgtctgcgccaagcccttgatttgcttggtggtgtgtcgaagaaagaaaacaaagagtgggaaaagctgttgggcgctatcgcctgaataagcggttgtaacggcgaaatcccggttttccggggtttcgccggtaagtgattgttatcccggcaaaaaactttggaaattgttgaaaataaatttgacacacttccaaaccgccattaagattcgccccgtcctcaccgatgaggggctatagctcagctgggagagcgcttgcatggcatgcaagaggtcaacggttcgatcccgtttagctccaccaatttacaggttcaaggtctggccacaccggccttgaatcgatcagttctcagcactgatcagttgtacagaaggttttgtccccttcgtctagtggcctaggacaccgccctttcacggcggtaacaggggttcgagtcccctaggggacgccagtttaaacaagcagttcgaaaggcctgctgcgtcgcgagacgaaaaatccggggctatagctcagctgggagagcgcttgcatggcatgcaagaggtcaacggttcgatcccgtttagctccaccaatttacaggttcaaggtctggccacaccggtcttgaatcgatcagttctcagcgctgatcagtgtatagaaggtttgtgtccccttcgtctagtggcctaggacaccgccctttcacggcggtaacaggggttcgagtcccctaggggacgccacgattacccgctctgcgggatttttaagggtcattcaattattgaatggcccttttgtttgtctggcgtttggccaattctctcctcatttcctgtttttgctctgaccagcggtcatgcctgtcgcttgccaaatattattatggtaataatattcaacccatgaaaaacggaggctgtgatgagcgataaaaaagcgcaaacccgcgaacgcattctgcaggctgccagcgccgcgttggtccagcgcggcccggccgagccgagcgtcggtgaagtcatgggcgccgcagggcttacggtcggcggcttctacgcgcactttgaaagcaaggacgcgctgatgctggaggccttcacccagctgctggccaggcgtcgcgcgtcgattgacgacatggacgcgcaattgactggcgaagagcgcaggagcctggtggcggccttttacctgtcgcgcaaacaccgcgattcgaccgcccaggcctgtccgatcccggcgaccgttggggaaatgagccgtttgcctgatgtgtttcgcgaggcgttgaacgagcacgtcgagctgatggctgcccaattggccgcgagccctgaggacactgacaaagcgctggccgacatggcattgatgatcggtggcctggctctggcgcgggccctgggcccaggcgagttgtccgaccgtgtattgcgtgcagccaaatcggcggtgcgttgaaaaaggagtcgcatgatgggcgcattaacctggatccgtggcttcaatggcaccgtcggccgtctcgcgccgcacacagtggccagcaaactgcgccgcacgtttatgacgccgcgcaatctgccgccgcgtgattgggagctgccgctcctggcgcaatcggagcgtgtcaccctgcggtttggtttgtcagcgttgcgctgggggcaggggcctgccgttctgttgatgcacggctgggaagggcgcccgacgcagttcgccagcctgattaccgcgttggtggataatggctattcggtgattgccctggatggccctgcccatggtcgttcgccggggcgtgaggcgcatgtgttgctgtttgctcgcgccatgctggaggcggccaatgagttgccgccgctgcatggggttataggtcactcaatggggggcgccagtgcgatgctggccgtgcaattggggttgcgtaccgaaacgttggtcagcattgctgcgccgtcacgcttcctcgatgtactgcgcggttttactcatatgatgggtttgccgccgcgtgcgcgctctgcgtttattcaggaggttgaattgacctttggcatgccgctcaagcacctggatgtggcgcactaccagatgaatatcccggggctgatcgtgcatgccgaggacgataccttcgtgccggtcagggccgctcaagcgattcacgaggcctggttcgacagccgcctgctgcgcctggaacagggtggccaccagaaagtattggccgacccccgtgtgatcgacggcgtactggcgcttctggctggccgtcgttcactgatgcggcaaaccgcctgatacactgcccccgccgacattaatcgactggagcaaggcatgggctgggatctggcaacgccgtttatcatcgacctgcaggtcgccgccgaagatatcgatggcctggggcacgccaataacgcggtgtacgtgtcctggctggaacgctgcgcctggcgccactcccagcgcctggggctggacctcaccgagtatcgccggctggaccgagccatggcggtggtgcgtcacgagatcgactacctggccgctggctacgaaggcgatgagttgcagcttgctacctggattgtcgattgggatcagcgcttgaagatgacgcgacgtttccagctgattcgtccccgggacggtgcgaccttgttgcgtgcacacaccacgtttgtctgcattgaactctccaccggcaagcccaagcgcatgcctgccgaatttctcgacggttatggccccgcactgacggggggttaacggtttctgcgggaaacccagtaaactgcgccacgatttttgttgagtgttttccatgcaaattgctttggcgcccatggaggggttggtcgacaacatcctgcgggacgtgttgacccacgtggggggtattgattggtgtgtgaccgagtttatccgcgtcaacgaccgcctgctcacgcctgcctatttccataagctcgcccctgaactgttgcacggtgcccataccgcagccggcgtaccgctgcgcgtgcagttgctcggttccgacccggtgtgcctggcggaaaacgccgcgctggcctgcgagctgggctcacaagtgatcgacctcaacttcggctgcccggccaagaccgtcaacaagtcccggggcggcgcggtattgctcaaggagccggagttgctcaaccagattgtcgaacacgtgcgtcgcgcggtgccggcgcatatcccggtcaccgccaagatgcgcctgggcttcgacagcccagatggcgcgctggtatgcgccacggccctggccgaaggcggtgcggcgcacatcgtggtgcacgcgcggaccaaaaccgatggctacaagccgccggcccactgggagtggatcccgcgcgtgcaggatgtggtcaaggtcccggtgttcgccaatggtgatatctggagcgtcgaagactggaggcgatgccgtgaagtcagcggcgccgaagacatcatgctgggccgaggcctggtggcacggcctgacctggcgcggcaaatcgtagcggcaaaggcaggggaagaggtagtggcaatgacctgggcacagatgcagcccatgctgcgggagttctggacccaatccgtagcgcagttgactgagcgccaggcgcccggccgtttgaagcagtggctggcgatgctgacgcgcaactacccggaagcggtggagctgtttacggcattgcgtcgcgaaaccgacctgcaacaggtcagccgtttgttgggcatgactcatccgatcgttgaaaccctatagaaatatcaagatcgcttttgcagggaactcaatccaaaaaaggtgccgaaggcgcctttttttgcaataacatacttcgcaagtttggcgggtgggtaatggtgtcagtaagttgcgttggtcgcggtttattagcgtgtgtgtcatgacttatagcccgtcagtggcgtgcggaaagggcttttactcaaaaggcgctaaggaaattcctaaggtttattttagtttccttgtatgaagggcgattcttggaactcgatggggcaaaagtccacgaacttgtgacttgaaagcgacgctgattgctttcaggttttcaatgacgctctttgttggctcgttaacagagccgcctcttactgaaaaggaacttggctatgtctttgtcgataaatactcctgcgttcgttaatgttgataatgcgcacctcgatcagtctgtgccgatgcccgcaagctccaacttgccgtcagttgccaataagcctgtccaggaaattctcaatactctaaaggacgatgccgtcgttgactcaggcacactgaacaagctgtttgacatgctggatcttgtcttcaaggcacttcgggaaatgtttgccggcaaacagtcgaaggccagtgtattgcccgataaggctgatttgccgactaaaccagaaacaggcaagcagctttcggagttttcttcccctgcgccaatcaagcccgacaccgcccctgacgccaaggcaggcgatgtgcccgggctgatgcgcgaagcgctaaagcaacagtctgaagccaagcctgatactgctgtcaaccatgaggtcaatacgaacgatttgccggttacgacgcgcagtgcactgaggccgaatctgggctcggtgctggcatcagactccaagtcgggcattaccgtgtctaatgattccaaggctgatgtgcatctgaacgtaaacattgatcattgtcactgccctgatatgtcgctggatactggcaggaggccaaggagtgtgccgactgtacaggtcttgtcctctggccctgacgttgatttcaccgctgaaacgacgccgcacaccgagcacgccgtaacgcctaaacccgggcaggaagtgaagccgggcctgacgcccgagctgacgccacacaccgagcacgccgtaacgcccaaacccgggcaggaagaaaagccgggcctgacgcccgagctgatgccgcacaccgagcacgcagacacgccaaagcctgggcaggacgtgaagccgggcctggcgcccgagctgccgccgcacaccgaccacgcagaaacgccaaagcctgggcaggaaatgaagccaggcctgacgcctgagcaggcaccacacgctgagcatgaggttatttcaaaagctgattttgatgaaggcgacaataaagtaaagcgcaatccgaaagatgatttgacaagcccggggccagccgcgaatcaatttgaattccaggattgatgcgtgaataagttgtcaaatttcgacgcttgatggaattgctgttttctaacttttttgagttccgaaaaatacttctccgagttgtaaggttcggagaagtatgggctgagggagggtttatgcgttgttcgttgaataatgtttgtaccgttgacatgcgccagatgtcctctgtggagttcatgcatgccactagtaaagcgccgctgcacggcccagttccaaatgactgtgctaagcaacagtcggttgaaatcgaaagtgcgccgggtcgtgatatcgggatgtttgatgtatttggcgttctgccaacgttacaagcgcttttgaataaacttgttggtttggtaatgggcgtggcggttggaaaacctgtagatatatttgcgccgcctgatctgaacctgaatatattgcccgagcctgtaccgcaagcgatctctcccggacctgcccctgcaggcgatatcccgggcctttcggcaaagcgcaatggtgcaaaaccggatgatatctggggtggatttcgtcaggggccggacggcaactgtgtgaccgtatctgccatcaaggctgcgatgcaccgatttggacaaagccccacggatatctacaaggaggttacaaaaatcgacggcggttaccgagtggtcatgcgcgacaacttcaggctcacgttgactgatcatgagttgcaacaagcagtgcagggctcgagttttgtcggcctcgacagggagatgctcaaggacgcgcggtttctgtacgccgccagtgccaagcgcgcgcaaatgaagaacaacgatggaacggcgggcagtagcttctacgcagcgatgcagagtttgaatgataaggaagatgagtggggccctggggaaggtttcgaacgcctgggtttaagggcgcatatgcgcacagtggaagcccgtgatcttgctgacggcctggtcggaatgtgcaatcgcagggggcattcggtggccgtgatcaacgggcgcgaagagttatggggtaggcaaggcggcgcgcccgtttacggcgacgcgattgccttggtttgacatcgcagccggacttttttggttcacctcaaaggaacaacggtatgaatctctctcccctcaatcgttcagtgctggcctggcacaccgggctgtcatcgcatgttgagcctgaaaatacgccagccatggttccggcattcaatgtcagcgaacggcgtttcggcgaaaacttcgacggcagcacccacgcggctgtgatcaaaatgatgatgatgacctttgggcgaacaccgtcggatgtgttcgatcaggtccgctctgtctctaatggctacgccattacgatgaaagatgagttcaaggttgaagtcactcacgaggagctgaaacaggcgtcttctgcttcaaggttcgcgggggcagacagtgcagtggtcagggacgccaacttcatgttcgccgcttttgtaaagcgtaagcaacaggcgggggactatccggatttttcggcggcgctggcgaaaaccctggaaggcgagactgctctaaggtgtctgcaaggcatgggggtgtatggcctggctcagtacgtccccgctcaacagatggtcggtgagggccgtgtgggggtgttggaaacccataatcggggaaatgcgctggtcctggacggcgtcaagtatgcccacggtggccgctatccagtggatagagggtatgggtttcgcctgctgaattttgataatgaccgccaagcccgcgcccctgcggttgtgtctgcggtagccgtcggcgcaaaacccgcggatgtctggtccgggttttatcagggcaatgagagcaattgtgtcaccgtttccgcgatcaaggcatcaatgatgcgcttcgggcaaaacccggctggcatctataaacatatcggcgccacccccgagggttatgaggtggtgatgcgcgacggcttcaagctgtgcttgagccatgacgagttgaaaagggcgcggcaggcttcgaatttgcgcggcgaagatcaggcgctgctgaacgatgccaacttcctgtacgccgtcagcgccaagcgcgcgcagttggagaacaatgatttcaggggcgaccagggttttgcggttgccctggacaccttgaatgacggtgagcatccgggggaagccttgcgcaggctgggcctgtatggctatctgcgtgactcggacgtcacggagctggcgaatggcgccattggtaccttggctgattttggccattcgatggctgtggtgcagggcgtattggattactacggccaaaaacacgatttaacgccctcgcgatggatgaacagcggatatcgtgccttgaagctggtgtgagcctaccccagcaatcgcttgaaaccctcgatcggcaacggccggctgtgcaaatacccctgaaacaaatggcagcccagtttttgcaggaatgccagttgttccggggtttccacaccctcggcgatcacttccaggttcaggctgcgcgccatggccacaatggctcggatgatttcggcgtcgttggggtcgtgggtggcatcgcgtacaaaggactggtcgattttcaacgcgtccaccggcaggcgcttgaggtaggtcaaagaggaataaccggtgccgaagtcgtccatcgcaaagctgacgcccaagcgtttcaggcggcgcatcttgagcactgtgtcatccaggttctggatcacgatgccttcggtgatttccagcttgagcaggctgaagggtaattgatgggtcttgaggctgcgttccacgcgctccacaaagtcgttctggcgaaactgccgggggctgatgttgacgcacaggctgaaactcagcgggtccaccaggccttcggcaatcaactgtgcaaaggcgccgcaggcttcatcgagaatccaggtgccgacttccaggatcaggccgctgtcttccagcactttgatgaattcggtgggggattgcgcacccagctgcgggtgctgccagcgcaccaaggcttcggcccccacgattttgttgccgcgcgcatccacttgaggttgatagtgcacactgaattcgccgcgtgagagcgccaggcgcaggtcggtttccatgcgcaaccgctcactggcggttttctgcatgctgttgtggaacatctgcgtggtgttgcgcccggagtccttggctctatagagggcgatgtcggcgcgtttgagcaaatccgccggggttgagccgtgatcgggaatcagggccacgccgatgctcggtgtgacctgcaaccgatggccatcgagaaacatcggctccgagagcaattcgcgcaaggtgtcggccaactcctgcacctggtggctgacttccgttcgcgtaccgtccaggccgctgagcaacaccacgaattcatcgccgcccaggcgcgcgacagtgtcttccatgcgcacgctggcttccaggcgcgcggtgacgattttcagtaccgtgtcgcccaccgggtgaccgagggagtcgttgatgtgtttgaagtggtccaggtcgaggaacagcagcgcgccgcgcaggttgtggcgcttgagcaaagcgatctgctggctcaggcgatccatcagcaaggcgcggttgggcagattggtcagcgggtcgtggtaggccaggtgccgaatctgcgcctgggcgtttttgagcaaactcacgtcccgcgcggtgagcaacaggcagggcgtttcattcagggtgatcggttctaccgagacttccaccgcgagtatttcaccgcgtttgttgtgccagagcatttccaggtgatgaatgcggcccttgatatgcagctcggccaacaacgcagagcgctggttttcgtcggcccagatgcctatctggtaaagcgtcaggccaatggcttcctcggcgcggtagccggtcaggcggcagaagccgtcattgacctccacataacgccctgtgtcgcgctccgtgatggaaatcgcatcggggctggagtggaaggccttggcgaacttctcttcgctggccttgagtgcagcttccgagcgctgttgctgggtgatatcgcgcagggtggtgacgatgcacggctggtcgctgaccttgatcagccggctggaaatcacgcaggtcaatatctggccactcttgtgatgcaccacgatggccacattgctcagtgactgctcgcggatcacccgttcgatgcgttgcaggcgcttgctcgaatcgtcccacaggccaatttgctcggcgctggtgccgatgacttcggcggcggtccagccaaaggtctgagtgaaggccgggttgatttcgatgaaggcgccgctgtccaggctggtaacgcagatcgggtcgggactggcctggaacaggctggcgaatttttcttcggaggcggtcaggcgttgctcgcgttccacctggtcggtgatatccagcagcgtgccggccatgcgcagcggcttgccggcttcatcgcgatacaggcgcgcacggctttccagaaagcgtgggctgccgtcatccatcagcacgcggtaggtcaactggtagttgccgtccgggccttcgcgcaggctgcggtaagcgttgcgcatgccctcgcgttcctcatcggacatgccttcgaaaaacgcatcgaagggttcgtgaaacggcgccggtggcaagccgtgcaattgggcggcgcgggccgagccatagagcatgccgctggggatgtgccagtcccaggtgcccagttgcgctgagtccagggcaaggtcaaggcgttcctggctgtccttgagggcctgctcggcgttcttgcgttcggtggtgtcaagaaaggtgctgatcaggtaagcctcgccctccagctcgaccttttgcgcactgagggtgccgtcgtgaatctggccattgctggcgcagaattgcacctccatggtgatgggctcgcctttgcgctgggtggccttgaccagcagcgcgcgctgttcgggatgacgccacaatcccaggtccagggtggtgcgtccgatgacgtcggccaccggccagccgaacagcatttcgaaatactggttggcttcactgatccgtccatcggattggcgggtgagcaacaccatgttcgggcagaggtgaaacaacgtagcgaagcgtttttcagagtggctgagggcgctttcgcggtcgcgctggtgggtgatttcgcgaatcaccccgatcattcgccttcgtccggttttgtccggcgccaggctgccgttgatttccagccagtgcaggctgccgtcgggccactggatgcggtggtgcatggcctgctcgaaaggttcgcctgccagcacggcgtgaaaggcccgcaccacacgggcgctgtcttcgggcgccagcaggtcgaggtaatcgaggtctttgggcagcggttggcgcgggtcgaagccgaacagcgcttgggtgccccgtgaccaactgatgcgtccggtgtcgatttcccagcaccacgcccccagccgggcagcgttgagggctgccagcaactgcggggcgctgtcccagctttgctccgcctcttgggggtcaagggcgtagatgcggggcaaaggtggcacggaatcaacggggttgcgcattatcaaagggccttggctcgatgggcattcggcgcggttttttcaggccttgaggccgcacagcttcatgccggtatccctggcatatcgacctgtgcatccaacaggctcatgaaagcccgcgcagcgttcgacagcgtcctttcggtgtgcacgatatagcctagctggcgactgagctgtatgcccggcaatgcgatgcttgccacctgctcatccagcatggtacgcggcagcacgctccaggccagcccgatggacaccatcattttgatggtttccagatagttagtgctcatcgcgatgttcggcgtcaggccctgggcctcgaacagccggctgacaatatggtgggtaaaggtgttgccgccgggaaacaccgccgggtggccggcaatgtccgccaggttgaccgtgctgttgccggtgaggctgtgctccggggccaccacgaaatccagcgggtcgtcccacaccggtgtggcgcgcactaaatgatgggggtcgggtgccagggtaatcacggccacttcggcacggccatggaggatttcttcgtaggccacttccgaatcgagaaattgaatgtccagcgccacattcgggtattcccgggtgaatgtgcgcaggatcggcggcaggcggtgcaggccaatgtgatggctggtggccagggtgaggcggccgctgacttcgccggtcaggttggtcagcgcgcggcgtgtatcgtccaatacgttgagaatctgataagcgcgcggcaacagggcccggcccgcctcagtcaagccgacttcgcggcccaggcggtcgaacaggcgtaccttcagttgttgctccagcccggcaatgcgcttgctgatagcgggctgggtcaggtgcagccgttcgccggcgccggagaagctgccggtctcggcgatggctataaaggcgttgaggttggccaggtccatagttgtattccagttggtaatccaaagcataaaaaatatgaatttgagttatttaatgtagcgccataccatcagcctcacaagccaaagggttattgaatgtctcaaggcccggggcatagaaagaccgatgatgaggaccgactgatggccggcaaaacgctttacgacaagctttgggattcccatgaagtgaaacggcgcgacgatggctcgtcgctgatctatatcgaccgtcacatcatccatgaagtgacctcgccccaagcgttcgaaggcctgcggctggccgggcgcaagccttggcgcgtcgactccatcatcgccaccccggaccacaacgtgccgacgactcctgagcgcaagggcgggatcgacgccatcgtcgacagcgtgtcgcgtttgcaggtgcaaaccctcgacgactactgcgacgaatatggcatcaccgaattcaagatgaatgacgtgcgtcaaggcatcgttcacgtgatcggccctgagcagggcgctaccttgccgggcatgaccgtggtgtgcggcgactcccacacctccacccacggtgcgtttggcgccctggcccacggcatcggcacctccgaggtggagcatgtgttcgccacccagtgcctggtcgccaagaagatgaagaacatgctggttcgcgttgagggcaaattgccgtttggcgtgaccgctaaagacatcgtactggccgtgatcggcaagatcggcaccgccggcggtaacggccacgccatcgagttcgccggcagcgcgattcgcgacctgtccattgaaggccgcatgaccatctgcaacatgtccatcgaagccggtgcccgcgtgggcatggtggcggcggacgaaaagaccgttgagtacgtcaaggggcgcccatttgcaccggcgggcgcagactgggacgcagcggtcgaagcctggaaagacctggtctccgacgccgatgcagtgtttgacaccgtggtcgaactcgacgcagcccagatcaagccacaagtgagctggggtacttcgccggaaatggtgttggccgttgaccagaacgtcccggacccggctcaagaagccgacctggtcaagcgcggctccattgagcgcgccctgaagtacatgggtttgaaagccaatcaggcaatcacggacattcagttggaccgtgtgttcatcggttcctgcaccaactcgcggatcgaagacctgcgtgccgcggcggtaatcgccaagggccgcaaagtcgcctcgaccatcaagcaagccatcgtggtgccgggttcgggtctggtcaaagcgcaagccgaagccgaaggcctggacaagatcttcctcgaagccggttttgaatggcgcgagccgggctgctccatgtgcctggcgatgaacccggaccgtttggagtcgggcgagcattgcgcgtctacgtccaaccgtaacttcgaagggcgtcagggcgccggtgggcgtacccacttggtcagcccggccatggctgctgcggcggccgtcaacggtcgtttcatcgacgttcgcgaattgatctgaggaatacccgatgcgtgcttttacccaacacaccggccttgtcgcccctttggatcgcgccaacgtcgacaccgaccagatcatccccaagcagttcttgaagtcgatcaagcgcaccggcttcggcccgaacctgttcgacgagtggcgctacctggacgtgggctacgcctatcaggacaactccaagcgcccgttgaacaaggacttcgtgctcaacgccgagcgttaccagggcgccagcgtgctgctggcccgcgagaacttcggttgcggctccagccgtgaacacgcgccgtgggccctggaagaatatggctttcgcagcatcatcgcgccgagctacgccgacatcttcttcaacaacagcttcaagaacggcctgctgcctatcatcttgagcgatgccgaagtggacgagctattcaagcaagtcgaagccgatgtgggctaccaactgaccgtcgacctcgctgcgcaaaccgtgacccgcccggatggcaaggtgtatcactttgaggtggatgcgttccgcaagcactgcctgatcaacggcctggacgacatcggcctgaccttgcaggacggcgatgcgattgcggcgtttgaggccaggcaccgggccagccagccttggttgtttcgtgatgtctgattggcggtagaccgtgcgggccccatcgcgggcaagcccgactcccacattggaatgcattccaactgtgggagctggcttgcctgcgatagcgccagtacagccaacccaaaatccaaggaaagccaccatgaccaccaccgcccacacccaagtcgtgcaaaaacaattcggcgagcaagcctcggcctacctgagcagtgccgtgcacgcccaaggtaccgaattcgcgctgctgcaggccgagttggccgggcagggcggtgcgcgactgctggacctgggttgcggtgccggtcatgtcagtttccacgtggcgtcactggttaaagaagtggtggcctacgacctgtcccagcagatgctcgacgtggtcgcagccactgcgaaagaccggaacctgggcaacatccgcaccgtgcacggcgccgccgaacgtttgccgttcgccgatggcgagttcgacttcgtgttcagccgttactcggcccaccactggagcgacctcggcgtggccctgcgcgaagtgcgccgtgtgctcaagccggggggcgtggcagccttcgtcgacgtcttgtcaccgggcagcccgctgttggacacttacctgcaaaccgtcgaagtgctgcgtgataccagccacgtgcgcgattattccgccgccgagtggatgcagcagctcagcgagtccggtttgcatgtgcgcaacagcagccgtcagcgcctgcgcctggaatacacctcctgggttgaacgcatgcgtacgcccgaggtgctgcgtgcggccatccttgagctgcaacaagcgatgggccaggaagtgcgcgattactacgaaattcaggccgacggcactttcagcaccgacgtgctggtggtctttgccgaacgttgattgatttttcccgacctgcccgcgggcgggtcgcttgatgaaatgaggaacgcatgagcaagcagattctgattctccctggcgacggtattggtccggaaatcatggccgaagcggtcaaggtcctggagttggccaacaccaagtacagcctgggcttcgaattgagccacgacgtgatcggcggcgccgccatcgacaagcacggcgtgcccctggccgatgaaaccctggaccgcgcccgtgcggccgacgccgtactgctcggcgccgtgggtggcccgaagtgggacaagatcgaacgcgacatccgccctgagcgcggcctgctgaaaatccgcgcgcaactgggcctgttcggcaacctgcgccccgcgatcctatacccgcaactggccgacgcgtcgagcctgaagccggaagtggtcgcgggcctggatatcctgatcgtgcgtgaactgaccggcggcatctacttcggctcgccacgcggtgtgcgcgagttggagaatggcgaacgccaggcttacgacaccctgccgtacagcgagagtgaaatccgccgcatcgcccgcgtcggtttcgacatggcccgtgtgcgtggcaagaaggtctgctcggtggacaaggctaacgtactggcctccagccagctgtggcgcgaaatcgtcgaagaagtcgccaaggactacccggacgttgagctgagccacatgtacgtcgacaacgccgccatgcaactggtgcgcgcgcccaagcagttcgacgtgattgttaccgacaacctgttcggcgacatcctgtctgaccaggcctcgatgctcaccggttccatcggcatgctgccgtcggcgtccctggacactaataacaaggggatgtacgagccgtgccacggttcggcgccggacatcgcgggccagggcattgccaacccgttggcgaccattctgtcggtgtcgatgatgctgcgttacagcttcaatttgagtgaagcggcagacgccatcgagaaggccgtcagcctggtgctggaccagggtttgcgcaccggcgacatctggtcacagggttgcaccaaggtcggaacgcaagaaatgggcgacgcagtagtcgccgcgctgcggaatctgtaatctctcgggcccccttgcagaagtttgctgcaggcggcccactttttaacaaggtgtagttgcgatgaaacgtgtaggtctgatcggttggcgcggtatggtcggttccgtgctcatgcagcggatgctggaagagcaggatttcgatcttattgagccggtgtttttcaccacttcgaatgtgggtggccaagggccgtccgtgggcaaggatatctctgcgctcaaagacgcctacagcattgaagagttgaaaaccctcgacgtgattttgacctgccagggtggcgactacaccagcgaagtcttccccaagctgcgcgaagccggctggcagggttactggatcgacgccgcctccagcctgcgcatgcaggatgacgccgtcatcgtgctggacccggtcaaccgcaaggtgatcgatcagcaactggatgccgggaccaagaactacatcggtggcaactgcaccgtcagcctgatgctgatggggctgggcggcttgttcgaagccggcctggtcgagtggatgagtgccatgacgtatcaggcggcctccggtgccggcgcgcagaacatgcgtgaactgatcaagcaaatgggcgcgacccacaccgctgtcgccgaccaactggcggatcctgccagtgcgatcctcgacatcgaccgccgtgtggccgaagccatgcgcagtgacgcttacccgaccgagaacttcggcgtgccgttggccggcagcctgatcccgtggatcgacaaagagctgccgaacggccaaagccgtgaagagtggaaggcacaggccgagaccaacaagattctgggccgcttcaagagcccgatcccggtggatggcatctgtgtgcgcatcggtgccatgcgctgccacagccaggcgctgaccatcaaactgaacaaagatgtgccgattgccgatatcgaagggctgatcagccagcacaacccatgggtcaaactggtgccgaacaaccgtgatatcagcattcaggagctgagcccgaccaaggtcaccggcacactgaatgtgccggtaggccgtctgcgcaagctgaacatgggcactcaatacctgggcgcgttcaccgttggcgaccaactgctgtggggggcggccgagccgctgcgccgcatgctgcggattttgctggagcgttgatcgcgtaaggcaatacagaaaacccgcgactggtgacaggcgcgggtttttttattgcctttgagtccctcatcgcaggcaagccagctcccacattttgatttgtgaatacattcaagtgtgggagctggcttgcctgcgatagggccatcagcttcgccacaaacactggcccaattgccccaccacccggtaaagtgccgctccccccgcaatgcccgaggcagcccccatgacccagacctttgaaatcgccgtgattggcgccaccggcaccgtcggtgaaaccctggtgcagatcctcgaagaactggagttccctgtgggcaccttgtacttgctggccggcaataactctgccggtgcatcggtaccgtttcgcggcaaaaacgtgcgggtcaaggaggtcgatgaattcgacttcagcaaggctcagctcgcgttcttcgcggctggcccagccgtgaccctgagtttcgctccgcgcgccattgcggcggggtgctcggtgatcgacctgtccggcgccttgccggccgatcaggcgcctcaagtggtcccggaagccaatgcccacattctcaaaggcctgaaaaagcccttccaactgggcagcccgagtccgtccgccgccaacctggcggtcgtcctggcacccttgcgcgcagtgctggatatccagcgtgtcagcgtcaccgccagcctggccgtttccgcccaaggccgtgaagccgtcagcgagctcgcccgtcagaccgctgagctgttgaacgtgcgcccattggaacccaagttctttgaccggcagatggccttcaacctgttggcacaagtcggcacgccagataccaaaggtcatacagccctggagaaacgtctcgtacacgaattgcgtgcagtgctggaaactcctttactcaagatttctgcaacctgcgttcaagccccggtgttttttggcgatagcctgacggtgtcgttgcaattgggcgcgccggttgatctggccgccgtcaaccgcgcactggatgccgcgccaggtatcgagttggtggaagagggtgattaccccacagctgtgggcgatgcggtcggtcaggacgtggtttatgtaggaagagtccgcgcaggtgtggatgacccggcggaactaaatctttgggtgacgtcagataacgtacgcaaaggctctgcgctgaacgccgtgcagctggctcagttgttgataaaaggccttgtgtaaaagatacttggcgccaatttgtagattgattctaaccaagcgctatgcttggccccaggcaggaacagttgcgcgtcggtgacctatcggctcgccatgccttatggcagcggttacccaccttctcgcaagtcggggagtgttcagacaaaggatgaggctatggttcaagttcgcaaactggtgttagcaatagcggccgcctcggcactgtcttccggtatggcgcaggcgctgcagctgggggagatgaccctcaagtcgaagttgaaccagccactgtcggtggaaatcgaattgctcgatgtcggcggcctcactgccgccgagatcacgccaagcctggcgtctgaccaagcgtttgttgacgcgggcgtggatcgccaggcgtttctcaatgacctgacgttcacgccagtggtcaacccgagcggtcgcagcgtggtgcgtgtcacttccagcaagccgctccctgattcctatgtgcgtttcctgctgcaggtgcaatggcccaatggccgcctgatgcgtgactacagcgtgctgttggatcctgccaagtttgagcaagcaccggccgctaaaccgcctgccgctgctccccgtttgagcgcgccgacaacgacggccccgactgtcagcaaagctgcgcaacacaccacgacgtcccgcgataccttgtgggaaattgccgagaagaatcgccatggtgcctcggtgcagcagaccatgctcgctattcaggcgctcaacccggatgctttcgtcgacggcaatatcaaccgtttgaaaaccggccaggtcctgcgcctgcccgatcacgtgcaggccaccagcctgccgcagccccaggccattgctgaagtgactgcgcaaaatgcggcttggcgtgaaggccgtcgcacggccagcaatcaagcgctgggcaaacagcaactggatgcgaccaagcgcaccgaggcgggcaatgcaccgtccaccacccatgcccaagacaatttgagcctggtttcggccgagtccgccaagaaaggcgcgaagggcaaggccagtgacggccgggcgctgagcgacaaactggcgatgacccaggaacaactggacaccactcgccgcgacaacgaagagctgaaaagccgcgcggccgacctgcaaagccagttggacaagctgcaaaaactgattcagctgaaaaacgatcaattggcccgtttgcaagctgaaaaaggcgatccggctgctgcagcgatgcctgcgcaactggccgctgaacctgccagcactccggccacgcctgctgcagcgcctgctgtcgccgcgccgacgcccgagccggtcaagccggatgccgcaccggcgagcaccgaaggcaaattcaatgacctgttgaccaatccgattgtcctcggtgtgatcggtggtgcggcgggtcttgttgttctgttgctcttgctgttgtgggcgcgccatcgcaatgctcgccgtgaagaggaaaaacacctgcggatggcgcgagcgctggccgaggagccggtattcaccgcgaatgtggatcacgatttgccacctgacagcttcgaagggctggaagtgccgccaccgaacgtcaaattggctgctgccccggcacccgcaccggttgttgagcctgtcgtggtgccgacagtcgcctccgtcctggcgcccctggccgtggccgtggcgccgcagaactccaatgatgcactggcgcaagcccagtcccatatcgaccgtggccatctgaaccaggccgcagatgttctgcagcaagcgatcaagcaggaacccaagcgcagcgacctgcgtttgaaattgctggaagtgtatggcctgcaaggcgacaaagaagggttcgtgagccaggagcgccaactggtggccaatggtgagaaccatgcccaggtcgagcagctcaagagccgcttcccggccatggccgtgctggctgcgggcgtaagcgccgcggtcgctgccgcagccctggacgcccaatacgtcaaggatttgctggaagacaagccggctgccgccactgcgcaacctgagcctttcgacactgatttcgacctgagcctggacgatctggaggccgcttcgcccgccgtggtcagcccggaagatgagccgagtttcgagtctgtactgcagcaacagactgaggccaaggccagcccggacgacctgtcggactttgatctggacctgcaactggaagagccggcatcccaggccgatgacgacttcctttcggggcttgaggcgcagatgaaagatgcgccggcagtcgagccgcctacattgacacccgctgcactggacgatttcgacctgccggaagacttcgacctctccctggccgacgagcctgctgctccagctgcggcggccaagccggatgcgtttgcctcggagctggatgacgtcaatgccgagctggaccgcctgtcccagagcctggagcatccgccgatcgagccatcttttaccgctgaagacgcggcgctggacagcgatgagccggaattcgatttcctgtccggtacagatgaggtcgccaccaagctggatctggcccaggcgtatatcgacatgggcgatgccgacggcgcacgggacattctttccgaagtgctgaccgagggcgatgaggcccagcgcagtgaggccaaggaaatgcttggccggttggcgtaacccttagtgtttgatccagcggcggccttcgggccgccgttttgcttttctgtgggagctggcttgcctgcgatagcatcaaccaggtttggctgaaggaccgggtcgcctgaatcgcaggcaagccagctcccgcacaaatcagcttctcactgagcagccccacaaaatggcccaagctcaggtttgccgcctataatggccacctttgcgcaactcatcaggctctcagttcttggcaaatatagataacgcggccgccgaaatggcggccgcaggcttttaccgcatcgccctgggcgtggaatacaaaggctcgcgctaccgcggctggcagcgccaggcctccggtgtgctgacggtgcaggaaactctggagaaggcgctgtcaaaagttgccgactcgcccgtctccctgatgtgcgccgggcgtaccgacgccggtgtgcacgcctgcggccaagtggtgcacttcgatacccaggccgagcgcaccatgaaagcgtgggtgatgggcgccaatatcaatttgccccatgacgtcagcgtcagttgggccaaggtcatgcccgcgcactttcatgcgcgcttcaaggccatcgccaggcgttaccgctacgtgatctacaacgatcagatccgcccggcgcacctcaacgaagaaatcacctggaaccaccgtccgctggacgccgagcgcatggccgaagccgcgcagcacttggtcggggtgcatgatttcagtgcctttcgggctggccagtgccaggccaagtcgccgatcaaggaagttcatcatttgcgggtgacccgtcacggcaagatgatcgtgctggatatacgcgccggggcgttcctgcaccatatggtgcgcaacattgccggcgtgttgatgaccatcggcacgggcgagcgcccggtcgagtgggccagggaagtgctggaaagccgtgtgcgccgcacgggcggtgtcacggcgcacccgttcggcctgtatttggtggatgtggagtaccgcgacgagttcgagctgccggagcgtttcatcgggccacacttcctcacaggtttcagcgaacttggcggctgacgcccggaatagcttttgttaccatccgggactttctcggtccaacccttgaggtttcacgacatgccagccgttcgcagcaagatttgcgggattacccgcatagaagacgcgctggcggcagtcgaggcgggggcggatgccattggtttcgtgttttacgccaagagcccgcgtgcggtgaatgtgttgcaggcgcgggcgatcatcgctgcgttgccgccgttcgtgaccaccgtaggcttgttcgtcaatgccagccgctgcgaactcaacgaaaccctggatgccgtgcagctggacatgctgcagtttcacggcgacgaaagccctgaggaatgcgaaagctacggccgcccgtacatcaaggcgctgcgcgtcaaggccggggatgatattggcgccgcgtgtgctgcctacacgggcgctcgcgggattctgctggacacctatgttgaaggtgtgcccggcggtaccggcgaggcgtttgactggtcgctgattccagaaggcttgagcaagccgattatcctggctggcgggctcaaccccgagaatgtcggggcggcaatcgagcaggttcggccctatgccgtggatgtcagtggcggggtagagcagggcaagggcatcaaggatcacagcaagattcacgcattcatgaggggcgtgcgcaacagtggtagcgggatgtgacggctggcagtctgccgccgtccataactaccactgtgtaaaacagcccggcgccgcctgtgggcggcccggtaacgaagtggcaaccctgcactggcaggttgtctggaaggctgaggatgcaggcgggaaatggcaggtcgaacgtctgaccccgtcccgcacgcatcatcgccacatatgaatttagctcaagggcatacgcggggctgtgttcaagccaccggtactggagaaagaaagcatgagcaactggttagtagacaaactgatcccttcgatcatgcgttccgaggtgaaaaaaagctcggttcctgaaggtctgtggcacaagtgcccatcctgcgacgcggtgctgtaccgccctgagctggaaaagaccctggacgtttgcccaaagtgcaaccaccacatgcgtattggcgcgcgcgcgcgtatcgacatcttcctggacgccgatggccgtgccgagctgggtgcagacctggagccggttgaccgtctcaagttccgcgacggcaaaaagtacaaggaccgcctgacagctgcgcagaagcagactggcgagaaagatgcactgatttccgtcagtggcaagctgctgggcatgccggttgtggtgtcggccttcgaattctccttcatgggcggctccatgggcgccatcgtcggtgagcgctttgtccgcgctgccaactacgccctggaaaaccgttgcccgatgatctgcttcgccgcttccggtggtgcgcggatgcaggaagccctgatttccctgatgcaaatggccaagacttctgcggtgctggcgcgtctgcgcgaagaaggcatcccgttcatctccgtgttgactgacccagtctacggcggtgtttccgcgagcctggcgatgctgggtgatgtaatcgtcggcgagccaaaggcgctgatcggtttcgctggcccgcgcgtgatcgagcagaccgtgcgtgaaaagttgccggaaggcttccagcgcagcgagttcctgctggagcacggcgcgatcgacctgatcatcccgcgtggcgagttgcgcccacgcctgggtaacctgttggcgcaaatgatgggcttgccgacgcctgtgtatgtcgcgcctaaaatcgaacctatcgttgttccgccggtgcctgcaaacctatgacccaacgtaccctgggcgaatggctcgcctaccttgagcagttgcatccgtcagccatcgacatgggcctggagcgctcgcaacaggtagcggcccgcctcgggttgggccgcccggcaccgcgtgtgatcacggtgaccggcaccaacggcaaaggctctacatgcgcctttgtcgccgcgctactgcaggcccaagggctgaaagtgggcgtgtacaactctccgcacctgctgcgttacaacgagcgggtgcagctcaatggcgtcgaagccactgacgagcaactctgcgaagccttcgccgcactcgatgtcgggcgcggcgaaatttccctgacctatttcgaaatgggcaccctggcggctttttggctgttcgagcgtgagcaattggatgtggtcgtcctggaagtcggcttgggtgggcgtctggacaccgtcaacgtggtggatgccgacctcgcgctgatcaccagcattggtgtcgaccatgccgattacctgggcaatacccgcgaatccgtggcctttgaaaaggccgggattttccgccggggcaagcctgcattgtgtggtgacatcgatccgccgcataccttgctcgacaaggtgcgcgagctggattgcccgttctacctgcgcggccgtgaattcaatctggatattggtactcggcactggcagtggcgcggtcgggatgcacgcgggcaagtagtggaactgcgtgatttgccgctgctgaacctgccgatggaaaacgcagcactggccttgcaggcttatcagctgctggatctgccgtgggatgctgagcagattgctgcgaccttgctgtcgacacgcgtggctggccgtctggatcgtcgtttctttgaatggaaaggcaagcggttgaacctgctgctggacgtggggcacaaccctcatgccgccgaatatctggcgcaacgcctttcccgcacaccgccggtcggtcgtcgtctggcggtgttcgggctgctggctgacaaagacctgggcggcgtggttgcgccgttgctggacagcgtccagtcctgggcggtagcgccgctggatacgccacgcagccgtccggccgttgagctcgaatcggcgttgcagaaccttggtgcgccggtgacgtcgtatgcaagcgttaccgctgcgcttgaggcgcaatgcgcggtggcgacggccgatgacgagattctgttgttcggatcattttattgtgttgccgaggcgcttgagtggttgtcccggcgctccacggaggaagctgcacatggcattactggatagcgcatacaagcagcgaatggtcggagccctggtgctggtggcattggcagtgatttttctgccgatgctgttttcccgccaggatgaacagcgccaggtggtggtagaggctccggctgctccgcaggccccggtgatgccgcaggttcaggtcgagccggtggtggtgcctgagccgcaggcgttgcccgaagagccggtgccgagtagcgaagaagttgcccagcaacaggcgccttcgacaccagtgcagccgagcgtgccggtggtcaagccggcgcctgctccggcgccggccgtggtcgccaaaccggccgcaccagcgcctgcgcccaagccagtagcgccgcaacctgctgcgccgggcaagccggatgtgggtcagagccgcatcgatccgaatggcttgccaatcagttggtccatccaagtggccagcctgggcaatcgtgaaggtgctgatgccttgcagaaaaagctgcgcagccagggctataacgcttacatccgcagcgccgaaggcaagaaccgcgtgtttatcgggccgttgatcgagcgtgccgaggcggatcgtctgcgggacctgctggatcgccagcagaacctcaagggttttgtcacccgattccagcctgagcgcggttgataccgtcggtctgtggttggaatgcaagctgaatgtgggagctggcttgcctgcgatgacggtgggtcagtcaacagtgatgttgaatgtgccggccccatcgcaggcaagccagctcccatattggttttggggtgtggttgaaatcgggttttctaaccccaagctattgatttgcaacgcacccgcaatcacagcttaccgatagcccggcgctctgctaaaatgcgccgccttatccgtacgtaggctgcactgtgccatttacctgggttgattgggcgatcgttgcaatcgtcgccatctccgctttgatcagtttaagccgcggcttcgtaaaagaagcactgtcgttgctgacctggatcattgcaggagtcgtagcctggatgttcggtggttcactgtcggtttacctggccgggtacatcgaaacaccttcggctcgcgtcatcgcgggctgcgccatcatgttcatcgccacgctgctggtgggggcaatggtcaattatcttattggcgagttgatacgtgtcaccggcctctccgggaccgatcgatttctcggcatggccttcggcgctgcgcgtggcgcgttgctggtggttgtggcggtcgggctgttgagcctggggccggtacagcaggattcatggtggcaggagtcggtactcgtgccaaaatttctattggttgcagattggtccaaaaacctcattttggggtggagcagtcagtggctggccagcggaatcagcgtacccgctgatcttccgttcaaggaacacctcttgccggccaaaacgcctcagtaagttgtgttcagtcaagattcattaagtaggggttgcgtcgcatgtgtggcatcgtcggtatcgtcggtaagtcgaacgtgaatcaggcgctgtatgacgcgctaaccgtcctccagcaccgcggccaggacgctgccggtattgtgaccagccacgatggccggttattcctgcgcaaggacaatggcctggtgcgtgacgtgttccatcagcgtcacatgcagcgcctcgtcgggcacatgggcattggccatgtgcgttacccgactgccggtagctcgacctcggccgaggctcagccgttctacgtcaactcgccttacggcatcaccctggcgcacaacggtaacctgaccaacgttgaacagttggccaaggagatttacgaatccgacctgcgccacgtcaacaccagttccgactcggaagtgctgcttaacgtgttcgcccacgagctggcccagcgcggcaagctgcagccgaccgaggaagatgtgttcgccgccgtgactgacgtgcacaaccgctgcgtcggtggttacgccgttgtcgcaatggtcaccggttatggcatcgtcggtttccgcgacccccatggcatccgcccgatcgtgttcggccagcgtcacaccgacgaaggtgtcgagtacatgatcgcgtccgaaagtgtgtccctggacgtgctgggcttcaccctgatccgcgacctcgcgccgggcgaagcggtgtacatcaccgaagacggcaagctgcacacccgtcagtgcgccgtggcgccgaaactcaccccgtgcatcttcgaacacgtctacctggcgcgtccggattcgatcatcgacggtgtttcggtctacaaggcgcgtctgcgcatgggcgagaagctggccgagaagatcctgcgcgagcgtcctgagcacgatatcgacgtggtgatcccgattccggacaccagccgtaccgctgcgctggaactggccaaccacctgggcgtcaagttccgcgaaggctttgtgaagaaccgctacatcggccgtaccttcatcatgccgggccaggcggcgcgcaagaagtccgtacgccagaagctcaacgccatcgagctggaattccgcggcaagaacgtgatgctggtggacgactcgatcgtgcgcggtaccacgtgcaagcagatcatccagatggcccgcgaagccggtgcgaagaacgtgtacttctgttccgcagcgcccgccgtgcgttacccgaacgtctacggtatcgacatgcctagcgctcacgagttgatcgctcacaaccgttcgacccaggacgtcgccgacctgatcggcgccgattggctgatctaccaggacttgccggacctgatcgaagccgtcggcggtggcaagatcaagatcgagcagttcgactgcgccgtgtttgacggcaagtacgtgaccggtgatgtcgacgaggcctacctgaacaagatcgagcaggcgcgtaacgactcgtcgaagatcaagacccaggcggtcagtgcgatcatcgatctgtacaacaactgagtaacgaccggccctgaggggccggttttgtatcttaaataaagcattgagtaaggagtcgcagcatgagtcaggaatgggatgccggtcggctggacagtgaccttgatggcgtggctttcgataccctggctgtgcgcgccggccagcaccgcactccggaaggtgagcacggcgacccgatgttcttcacttccagctatgtgtttcgcaccgctgctgacgccgctgcgcgttttgccggtgaggtgccgggcaacgtgtactcgcgctacaccaacccgaccgtgcgtgcgttcgaagagcgtattgcggccctggaaggtgctgagcaggcggtggctacggcgaccggcatggcagcgatcctcgcggtggtgatgagcctgtgcagcgccggtgaccacgtgctggtatcgcgcagtgtgttcggctcgaccatcagcctgttcgaaaaatacttcaagcgcttcggcatcgaagtggactatgtgccactggcagacctgtccggttgggatgcggcgatcaaggccaacaccaagctgctgtttgtcgagtcgccgtccaacccgctggccgaactggtggatattgccgcgctggccgaagtggcacgcgccaagggcgccatgctggtggtggataactgtttttgcacgcctgcattgcagcaaccgctgaagctgggcgcggacattgtcgtgcactcggcgaccaagttcatcgacggccagggccgttgcatgggtggcgtggtagccggccgtagtgagcagatgaaggaaatcgtcggcttcctgcgcactgctggcccgaccttgagcccgttcaatgcgtggatcttcctcaagggcctggagacgctgagcctgcgcatgaaggcgcattgcgccaacgcccaggcgctggccgaatggctggagcagcaggacggcatcgagaaagtgcattacgccggcctcaagagccatccgcagcatgagttggcccagcgccagcagcgtggcttcggggcggtggtgagctttgaagtgaagggcggcaaagagggcgcctggcgctttatcgatgcgacgcgcttgatctccatcaccgccaacctgggtgacagcaagaccaccatcacacacccgagcacaacctctcatggacgtttggcgccgcaagagcgtgaagctgccggcatccgtgacagcttgatccgcatcgcggtgggcctggaagatgtggccgatttgcaggctgacctggctcgcgggctggccgccttgtgatcgagtggtccatggaggctgcaacggccagtaacgggcgtgtcgcgctggtcaccggtgcggcgcggggcattggtctggggatcgccgcctggttgatcagcgaaggctggcaagtggtgttgaccgacctggaccgcgagcgcggttcaaaagtatccagggtgctgggtgaaaatgcctggttcatcacgatggatgtggccgatgagaaacaagtagcccaaggtgttgccgaggtgcttgggcaattcgggcgcctggatgcgctggtgtgtaacgcggcggtcgccgacccgcgcaatatcaccctcgaaagtcttgatttggcttactggaaccgtgtgttggcggtcaacctcagtgggccgatgctgttggccaagcactgtgcgccgtatttgcgtgctcacggtggcgcgatcgtcaacctggcatcaacccgggcccgccagtcggagccggacaccgaagcctatgcggcgagcaagggggggctgctggccctcacgcatgcgttggcgatgagccttgggccggaagtgcgggtcaatgcggtcagcccgggttggatcgatgcacgtgatcctgcggcacgtcgcgccgagccgctgagcgacgctgaccacgcccagcatccggcgggcagggtgggcaccgtagaggacgtggcagcgatggtggcctggttgctatcgcgtcaggccgggtttgtcaccgggcaggagtttgtcgtggacggcggcatgagcaagaagatgatttacagcgagtagggcgcatggccgtcttgaagcaattttgtctttttcagaaaaacttcaagcaggctattgacttaggtctgctatctgcgtaaatttcgcggcctcaacgaagcaaagggtgattagctcagccgggagagcatctgccttacaagcagagggtcggcggttcgatcccgtcatcacccaccacttcttgagagttttgccttcgggcaagacgcaacgttaaaggttgcaccgacgcgcagcggtagttcagtcggttagaataccggcctgtcacgccgggggtcgcgggttcgagtcccgtccgctgcgccatattttccaggcctgagtagtcgggtttgagattgaacagccgaggctgatcagtcagatgtttaaagacggttgaggctttatgcttaaccggtcaagcgatacgcagcggtagttcagtcggttagaataccggcctgtcacgccgggggtcgcgggttcgagtcccgtccgctgcgccatatctgcttcaaggcccactgaacgccttgaagcacaaagcaagcgtcaagcttctttgatccgatagcaaagaccctggtcgaaagaccggggttttttgtttttgcgatttggcccacggggccaccttggtcaaaagtgtgggagcgggcttgcccgcgatagcggtgtatcggttagcgaatatgttgactgatccgacgccatcgcgggcaagtcgaatcgtcgcaccgccgctcccacagttgggttgtgtcagaaacccagcttatcccgcagcccgtaataccaggcccccaaggccgcaaacggtgtgcgcagcaattgcccacccgggaaggggtagtgcggcaggtcggcaaacgcatcaaaacgctctgcctggcccctcagggcttccgccaacaccttgcccgccaggtgcgtgtacgtcacgccatggccgctgcagccctgtgagtaatagatgttgtcgcccaagcggcccacttgcggcaaccgcgacagggtcagcaggaaattgccggtccaggcgtagtcaatcttcacatccttgagctgcgggaaggccttgagcatcttggggcggatgatcgcttcaatgttcgccggatcccgcgcgccatagaccacgccgccgccgaagatcaggcgcttgtcgcctgtgaggcggtagtagtcaagcaggtagttacagtcttcgacgcagtaatcctgcggcagcaacgtcttggccagctcatcacccaaaggcgccgtggtgatcacttgcgttccgcacggcatcgatttggctgccagctccggcaccaggttgcccaggtaggcgttgcccgcgacgatgatgaacttggccctgaccttgccttctgcggtgtgcaccaccgggttcgcgccgcgctcgatacgcaccgctgccgattgctcgtagatggtgccgcccagggattcaacggccgccgcttcgccgagtgccaggttgagcgggtggatgtgcccaccgctcatgtccagtaggccgccgacatagttgtcgcacgccaccacttcgcggatacggcgttcgtccagcagttccagttgtgtgtgcccatagcgctcccacaggcgcttctgcgactccaggtggcccatgtgcttgctgttgagtgcagcgaacacgccgccgtctttgaggtcgcactggatctgatacttggccactcgctcgcgaatgatcttgccgccttcaaacgccatattccccaacagctgcgcttgcttggggccgacgctgcgctcgatcacatcaatatcgcggctgtagctgttgacgatctgcccgccattgcggcccgaggcgccaaaccctactttggcggcttccaggacggtcacacgaaagccgttttccagcagaaacaacgcgctggaaagcccggtgtagccggcaccgatcacgcacacatccgtttcgacttcaccttgcagcatcggccgaggtgggactgcatttgcggacgcggcgtaatacgactgggggtagggggtgttcgccatcctggaacctctgttttatattttttacgagtgccgagatcctacctcagttgaaaattgcctgccagccaccccaaaatcacaaacgtgcccgtcgcaaataaaaaattcgcatattcatagggttagctgcaaaaaagatgttgacaccccttcggaattccgtagaatgccgcctcacagcaggcacgtagctcagttggttagagcaccaccttgacatggtgggggtcgttggttcgagtccaatcgcgcctaccaaacaaaatccgctctgctgggcggtctagaagggctcaccggaaggtgggcccttttttgttgcccgggatttgagcaagcgcccaccttggcgctagaggtcaatagcaggccttacgcaggagtcagcagaaaagcgtagccaccgatagcaggcagatgatttgcaccaccatctggcagcgtatttcaccattggttgtcgccatacccatttgtccggcgtacatagtggctatcctctttgtcggcaacagcgccgtcagcgctgcacaggaacgcgcagtggctgtattgagtataggcacggaacgggaatcttcacggtcacagctatttagagcggttgagcacgttttctccggcggctttgggcaatcggtacacgtcaatcaagcctataaagccaagcaacgccacgcccacgaacgccacccgaaagtccccggcgcctgcatgcgcttcgtgcccttgcagggtcatggacgctcgcaacagcaacgccgcaatcgacactcccatgcccatggccaactggaacgccatgctgaacagtgcggatgcctcactcattcgcgccttgggcacatccgcaaagccaattgagttgtagcaggtgaattgcatcgagcgggacagcccgcccacaaacagcaccgccgcaatcagcgcgaagggcgtttgtgcggtaaacagggcgcaggctgctaccagtgcgacgccgattgcgccgttcaccagcaatacttggcgaaagccgaagcgctgcatgatcggggtggtaaacggcttcattgtcaggttgccggcaaataccgccaataccagcagtcccgcctctaccggcgacaggccgaagccgacctgaaacaacaacggcagtaaaaagggcagcgcgctgatcgcgagccggaatagtgaaccaccgaaaatgctcacccggaaggtcgcgatggacagcgtctgcagtggcaataacggttcggcatgcgtgcggcaatgctgcactgaccataccgccagcaacgcacctgccgccaccagcgcaaagcctgggatcagtttgtcgccggtctggctacccaacaattccaggccgcccagcagggccacgcaggcgcttgccagcagtacaaaacctttgccgtcgaactggcgcacgttggcttcacgccctttgggcaacagccacagtgctgcaaccagtgccagcgcgcccaaggggaggttgatgaaaaaaatccacggccaggaagcatgcgtcacgatcaaaccacccaccaatggacctaggatgggggcaaccaggccgggccaggtaatcaccgcaatcatgttcaccaagtcttttttgtccgtattgcgcagcaccgccaggcgccccacgggtaccatcagcgcgccgccgatgccttgcagcacccgtgctgtcacaaacatctgaaggctttggctcaagccgcacaacagcgaggccagggtgaagatgacgatcgctgcggcaaacacccggcgcgcgccaaaacggtcggccacccaactggagagagggataaaaatcgccaccgcgaggatgtaggcggtgataccgatattcatgtcgaccggcgtgaccgcgaacccttttgccatggtcggcagggcagtggcgatgacggttgcgtcgaggttctccatgaaaaaagtcacggcgaccaccagcgcaatcagtcgggtttgtacgccagaagtgctcgtagcagaaaaagtcacccgtgccgcccctcgttcaatagacgtcgatcaaactcgacgataccgggtcggccctggactcgcacgcgccaatcagcgtgtctgcgtcaccttctgcaaaaacctcggctgatccgggttgcgcctacgcgcaacggccaactgcgcggcattcaaatagaacccctggatcattgtgaacggctccagtaacggatgcgccgtcggcacgctcggcagcaaaccttcacaggccgtgccgagaggtgcgactaccaacacttgggcgcctcgcacacgcatgtcttcggcaaaggccagggtgccggactgctctgggcccgagggcgcaaataccagcacggggtagccttcctcgataatttccattgggccatggcgcacttctgcgctggaaaacgcttcggcctggatgccggaggtttccttgagtttcagcgcggcctcctgggcaatcggcagcgctgcgcctcgtccgacaacaatcattttgtcggccgttaccagcagcttgcgcaatggcgaccagtcttcggcggttgcctgattcagctggtccggtaatgccttcagggccagactcagcccgttgccgatagccagcgcctctgcaaggtatgcaactgtttgcgcgccagccatcaacatcgccacatagcttttggtggccgccacactctgttcaaggccggccggcagcaggatttcatgatcgcttacagtggccagcggtgacctggcggtgtttaccagtgccacggaacgggcgccgcgctggtgcaggtaatgcacgctgtcgatcaggtccgggcttttgccggactgggaaaaggccgcgacccaagcgtttttcaggcgcagcggcggttgttgcaggctgaccagcgacaagggaatcgacaggctcgggatgcctatctggctcatcagcgcgtaggcgaaataggcggcggcgtgatcggagctgccgcgagccactgtgatcatcaactcaggcagggattgagcccattggtgtgccagcccgcgaacggcgcggtcatcgtcgagcatgcgttgcacaatcgtggggatggacagggtttcattcagcatcaatgacatggtcaatctccagagatatcgatgcgcttgcccgcagcgatcaactgttgggcaatcgtgttcagcccggcggcctccatggccatgctgaaggcaccccacaacggtgcatcgtgggtgaagtgcgcggtggcaagggtgggcgggaaaggcaccacgcgctggatcaattgttcgatcatcggcgccagcagcgcagcctgacggtagaggccgccgcccaccgtgatgcgttccacatccagcgccacggcgaggttggcaatgtgcacggcgcaggcggcgatacgcagttcaagggccttgcgcacgtcggtatccgtgctgctgaacaggtccagcggttggcggccatggcccaacagatgttccgccaactggctgagcgcgttgccggaaaatagctcttccaacggcgcgttaccgttttggtaggtggcccagtgttcaggctgcagagggtcgaggaagggcgacaacagatagccgatctccatggctgcgccgttatgcccgcgaatcaatttgccattggcgatagcggccgccgacaggcctgtgcccaggttcaggtagatcgcattgtcgacccccgccagcgacccccagcgcacctccgccagcgcgccggctttcacatcgttatcgaggctcacgcacacattgccaaaggcctgggcgatcagcgcctgcaagtcgaggccctcgaagcccggcgtgttgggcgccatcagcagggtagggccgcgcaccacgccgggaaacacggccgccacactcaacacttgagcattgccgaattcggccacgcaatcgtgtgcggcctggaggatgcgctgcagggcaggcaccccggataaaccctcggcatgggtggcgagaatccgcgtattcatgcgctggcgagccgtgtcgtagcaggcgacctgagtcttggtgccgcccacgtcaatcgccagcagcaagccttgtcgcggcgccgcagcgccggttgatgcccggggttcatgcattgcattcatcacttattgaagggccacagccgttgaacccgtgcccagaacagataggccacgctgcccgccaacacccacaccaacgaccactggatcgggtaggcgccgggcgcattgtggttggacgccatatagatatagacccaacccagcagcgcaatgaaggccggcaccgggtagagccacattttgtaaggccgcgccaagtgcggtttggttttacgcagcaccagcagcgagacgatctgcgccaccgactgcacgaggatcatcaccgtggtcagcagttggatcagggtgttgaggtcggtcagccggccgatcatgaaaccgaccgacgtcagcaggcccatgctcaagatgccccaggtcgggaattcatgcttggggtgggttttgctgaaagcgttgaagaacaccttgtctttggccgcttcgaacggcacacgcgagccgccgagcaaaccggcaaagaccgaggcgacggcggtgatcaggatcaacaccgtgacgaccccggcggcggtgctgccccaggtttcactgaggaccacggatgccacggacttgtaggcggcagattccggatcaagcatgcgatgccaatccaccacgcccaacacgccaacctgcatcaccaggtagatagcgaggatgccgacgatcgacaggatgatcgacttggggatcacccggcccggttgttcgacttcaccggccaggtaggccgaggtgttgtagcccaggtagtcatagatgccgatggtcaggccgccggccatgccgaaccagaagccgctgtccgccaggttgaacgcgccttcggggaaggtgaacgccaggtcggcatggaagttggacagcgcggcggcaatcagtgcgccgatgctgaccagcatgatcacccacagcacgatgctcaatttggcgatggattcgatcttgcgccacagcatcgcgatgatcagccagatgaccaccaggccgatcaggttgccggcggtctggctcatatcgggccagaaccaggtgaggtattgcacgaagccgatgatgccggtggacatgatcagcgggataaacagcatcgccgtccacacaaacagaaagggcagcaacttgccggtgcgtttgccgaaggcttcacgcaggtacacataagtaccgcccgcaccgggcaaagacgcaccgagttcggcccagaccagcccgtcacacaaggccagcaaggcgccgagaatccagcccaggtaggcctgggggccgcccatgatcacgatcatggccgggatggtgataaacggacccacgccgcacatctggctcatgttcagggtaatggcggggaataggccgattttgcgtttgccgcctggcaaatccggatcgacgggtgtcagcgtgctcatggggacgacctcttgttcgagtgacagacgcgtgagggcagattgcaaaagggcctgcttgccatcgagggttctgtcgacccgtcattgttgttatggggcgtaaccggcattcgcagtggctgcgagtggccgaggcgcctagaaaaccacagcaagagtattaattcaacttgatttaattaattggcagcgtggatcatcgggcgatgaaaagcccccagaacaaacgctctgtcaccaccggcaccaatgccgaacacgcccggctgcacaaccgccgggtgatactcgaggccattcgccagaacgggcgactgactcgtgccgacctcacgcgcttgacgtcgctgaccgcacagaccatttccaatatcgtcaccgagctgcaggaagagggcgcgctgctggcccacgcggccgagaagggcgggcggggccagccgccggtgccgctgtcgctcaatcctgacggcggctattccattggcatccatatcgaacagcaccgcatcatcggtgtgttgctcgacttgctgggccagaccgtggcccaggtaacgttgacggtcagctacccaacctttgagcaagcattgccgctgattctcgacagcgtaaaaggtttccgtgagcagcggccgcaggggcgattccttggcgtgggcattgccttgcccggcccgttcagtgtggagggcatgaccgccgtgggcccgacggcgatgtcgggctgggacgcggcggatattccgctgcgcttgcaacaggcgacaggcctgcctgtgctgattgaaaatgacgccaccgctgcagccatgggcgagcggctgtatggcgtcgccagcgagctgaacaatttcgtgcacctgtttatcggcagtggcctgggcgccggtttgtacctggataaccgcctgtattccgggcactggcacaacgccggtgaaatcgggcacatgacggtcatacccggcggcaaaccctgtgattgcggtaatcaaggttgcctggaacgttacatctccattgcggcgttgctggaacacctggggttaccggccgagcacgacctcggcgcatgggatgcgaacgacgagccactcaacgcccgtgttgacctgtggctggacgaagcggcgccggcgttgcgccaggccatcaacattcttgaatcggtactcgacccgcagaccatcctgatcagcggcttcctcccccaggcgctgctcgcgcggctaatgagccggctggaaccgttgagccgttccatcagcagccgttccgaccgccagcacccacgcatacagatgggcgcagccgggcaggatgcggtggcgttgggggcggcggcgttgatgatcctggcggagatcagcccggactatgaggcgctgctcaagccggagtgaggcgggcatgttgcaggcacccctcccacaaaatttattggttcgcagctacaatttttcttgttggacacctcccgccccaggcagcaaagttgccgccactgacgctcgaccttccaggtcaacaataaaaaaaccgagccgactgcacgccactttcatgctgtgagccctttgctcacatcctgctgtaatggcgccgcagcgcgcactaaaggacctcaccgccatgcaaactgttgtgaacctatggccactgatcggtgtgcttgtgatcgtggttggcttcgtcttgcgcttcaatccgctgttggtggttaccgccgcagccctcgccaccgggcttgccgcccagttccctctggaaaaaattctcgccagcatgggtgaaggcttccttcagacccgcgccctgcaactgatcctgttattgccgctggcggtcattggcctgctggagcgtcatggcttgcgcttgcatgcgcagaactggatcgcgcgtttcgaacgggctacggtcgggcgcttgttgatcatctatctgtttgtgcgtgagtccacagcagccatggggcttaccagcctgggcgggcacccgcagatggtgcggccattgctggcgcccatggccgaaggggcggcagaaaagcgctacggcaagttgccggataaattgcgccacaaggtgctggccatgtgtgcggcgacggataacgtcggcctgtttttcggtgaggacatctttgtcgcctttggcgcaatcgcgctgatgcacaccttcctgttgggctcgggaattgacgtagaacctttgcatattgcggtgtggggtatcccgacggcgatttgcgcgttcatcatccatgcgattcgcctgcaccggtttgatcgcaggctgacccgcgatatggcgcgcgcccctgttgcggtggaggctgcgcaatgatcatttccattcaatacctctactggctggccggcgtgttgctgctgattaccgcgggcatgatcctgctggaccgcactcaccccaaacgatggtccaccgcgttgttctggttgctgtttgccattccgttcctggtgggcgagcgtttgccttcggtggctatcggcgcgggcgttgtggtgatggcactgatcgcaggttttggcggcgtagggcgtggcgcccacggtcaattgcacgacaaggctgcccgtgccagcgctggtcgcctggggcacaagctgtttattccggcactggcgattccgctgacgacggtcattggctcggtgttgctcaagcacactgaaatcggcggcgtgccgctgctggatccgaaaaacaccaccttcgtttccctgggcatcggttgcctgattgccctcggcctggcgtgctggctgacccgcgacacgccggtgcaagccttgcgcgagtcccggcgcctgaccgaagcgttgggctgggccatggtgttgccccagatgttggcgatgctcgggctgttgttcaatgaggcgggcgtgggtacagccgtcgcccatgtcaccaccacctacatcaacctggacttcaagttggtggccgtcatggtctatgtagtgggaatggcgctgtttaccgtgatcatggggaatggctttgcggcattcccggtgatgaccggtggcgttggcgtgccggtactggtgggcatctatggcggcaacccggcggtgatggcggcgatcggcatgttttccggttactgcggcacgctgatgacgcccatggcggcgaacttcaatatagtcccggcggcgttgctggagttgccggacaagaatgccgtgatcaaagcgcaattgccgaccgcactgatgatgctggtggtcaatattgttttgctttacctgctgatgtgaggtcgagatgcgaaccgtattgctgacgggtttcgaaccctttgacagggactcgatcaacccttcctgggaggccgtgcgccgtttggacggtgtgcagttgagcgaaggtgtgcaaattgttgcgcgccaactgccctgcgcgtttgcctcggcgggagagtgcctgatacagatgatcgacgcgttggagccggccatggtgattgccaccgggcttggaccgggacgtaacgccatctcggtcgagcgcgtggcgatcaatatcaacgatgcacgcattcccgacaatctgggggagcagcctgttgatacggctgttgttaccgatgggccggccgcgtatttcagcacattgccgatcaaggccatggtcaaggcggtgggcgagtcggggatagcggcatcggtttcgcagacggcggggacattcgtgtgcaatcaggtgttttatctattgcagcatgcgctggcgggcacaggtgttcgcagtggttttatccacgtgccgtatttgccggagcaagtggttgataccgggcagccttcgatggcgctgctgacgatggttgaaggcttgcgtgtggcggtatgtgctgcctgggagacaggcgtggatctagccgagaccggcggccaggtcagctgacctgccgcgttggcctcagctgctgagcaaccgggtcaggccaaaggtgatggcgcaggccaggcctgtcattgcgaacgcggtggcgacgtaccactttatgaggttgagctcggtggttgcgaggtcggcgcgcgtagcgaagtgtttttcattggagtctgccctgctcgaaacggtgaatagtttctctttcatttcagccagccccttttccagtaaacccaagcgtttttccaggcccgaacctccgtcgtttcctccaccgcctctgccttgagcgggaatgttcagcgcgttcgtcccactgatccgatactgttttttctccaaagcatgacacccgtttcaaacaatgtgagatagcacttgagggcaagagtagtcggagtcaggggggctgggtgataaacaaacctttgcaaaataacaccaggtttctggcgcgctgctttcagtcctccctgcgagggaagaacaactcaaaacacgttacgccctgctcgctggtgacgctgtagcgaccgctatgcaactgcatgatggtcgccacaatcgacaagcccagcccgttggactgcgcggaacgttcgcgggactcatcaacccggtagaaccgttcgaatagtctgggcaaatgctgcgcgggaatggtttcccccgtgttgctgaccctcaggcttatgccctcggcgttcgggacggcctgaatgaccaattcagaactcggcgcgccatacttgatggcattggcacacagattcgccagggcccgacgcaacagcatcggttcagcccaaatgacaccgtcgccctcggcgagaatgctgatatccacatcgctcgccagcccttcgaagtagtccgccatacgctccacttcatccgccgcactcagttcctggcgctggcgcagggcactggccgggtcggttcgggcgaggaacagcatgttgtcgagcatgcgtgccaggcgctcgagttcttcgacgttggacgccaacagttgctgatagctttcgatgctgcggctttggtgcagggcaacttgggtttcgcccagcaggttattgatcggcgtgcgcagttcgtgggccatgtccgtggaaacctgacccaactgtacaaagcctttggccagccgttcgagcatggtgttgaacgagtcgatcatcggcagcagctctttcggcgcaccgtggctgtcaaggcgctcggccaggttgcccacgccgatgccctgggcatgcttggccaggcgccgcagtggcaccagcccgcgatgcaccatcacataactcactacggcgaggatgaacgcggcaatgcttgccaggataaacacactcaagcggtagctggcgagcatcgcggtacgctcggtcatcaggcgcccggtggtgacctgcaggctgcccaggtcgccggagtcgatggaggccgccacggtggcaaagggcacgccgttgacgccgggtaaatggtgcacgtcggaaaagcccagttcatggtttcttggaacgggggtcaccgtcggcatttcgatgttgcccgggttgaccaacagcagtggcttctgccccggcgccgcaatgctcagcaccgactcgctgttgcccagcatgttctggaacagttccggcttggttttgatcaggtccagggtgttgctgtcattgagcaggttgcgcaactggtcggcgcggtagatcagcgccgcatcgtcacgcttgatcaattcgcgctccagttcgcggtacagcgccacgcccagggtggccagcagggcaaaggcgagcagggcgaagatcaacgccaggcgcagggtcagcgaataatgacgacggcggctcatggctgggtatcgaagcggtagccgatgccccgcacgctgtggatcagcttgagctggaaagggtcgtcgattttaaggcgcaggcgccgtacggccacatcgaccacgttggtgtcgctgtcgaaattcatgtcccatacccgcgaggcaatcatcgagcgtgacagcacctggtcctgatgggtggcgaacaggtgcagcagcgcgaattccttgttggtcagggtgatgcgtgtacctgcgcgagtgacgcggcgtttgagcacatcgatttgcaggtcggcaatctgcagctgttcctcttcgcggctggggccacggcgtgtcagggtacgcaagcgtgcaaccagttcggcgaaggagaacggtttgatcaggtaatcatcagcgcccagttccaggcctttgatgcggtcggcaatgtcgtcacgggcggtgagaaacagcaccggcgtgtcggcttccttgcgcaaccggcgcagcacttcccagccgtccattttcggcatcatgacatccagcacgatcacgtcgaacggcgtttccagcgcctggtgcaatccatccacaccgtcgcgggccaggctcacggagtagcccagttcctgcaggccgttgagcaggtaattgccggccttgggttcgtcttcgacaacaagaatgttcatgggaagtgccctggttctgtgcgtggcgcaagtgtagcccgatcaattgtcactggcgcaaccgatgccctgtacctggtagtccagcacatgttcacggccctgatggtcgaggtagtcgaggcgcgcgggaacgatgccgcattggccgtaggtgtcggtgctcgacagtactttgtcgacatccagatgtacaaagaagctggctttgtcgtggatcacgtcggcggcggaggcggtgtcggcagcaaacacggagccggtggcaagcaaagcggtaaagccgaggataaacagtttcatggcggtatctctctttaagggtgggctgccgggtgatggcagtgagttcacgttaaccagtggcacccaacagccaaccaacaggatgatgacaagttcgtcattcagggtttaaggctggcgaccggacgcttcgaggatcaggtcggtgatttccttggcgtgggacaccagcgacaagtggcttgaaggcagctcgatggtggtggcgttcatgcgtttggcgaggaagcgttccaggtccgggttgatggtctggtcattgctcgacaccgcgtaccacgacggtttggtgtgccaggcggcattaaccgtgcggccactgaacagggttttggtgatcggttgctgtacggcgtacagctccagggccttggcgtgcggcacgtcggcggcgaagtacttgaggaaggcgtcctggctgagggtgaggtagccatcgtgatcttccacgccggctcgcacaggcatggtcgggtatttggcggagagtgcgacgaaatcttcgttggcgtccggtgcgcgagcggcgacgtaaaccagcgagctgactttcgggttgaccccggcgtcgctgactacggtacccgcgtaggaatggccgaccagcacggtaggaccgtcctgttgatcgagtacgcgattggtggcggcgacgtcatcggcaaccgaagtcagcgggttttgtaccgcagtgacgtgcagcccggctgcctggaggcgagtgatcacctcggaccaactcgaaccgtcagcccaggaaccgtgcaccagtaccacgttgttggccttgaccggtgcgacggtgccggccatcgcagtgccggtgccgagcatcaacaggctggcggcgatcaggcagagtttgcttgcaggtttcatgggtggaccctttttcatcagtgggaagtggcgtcaaccggtgtgggtgactgacgactccactgtatgaagtgagggggctgacaagacttacagcttcattacaaggttgtaatgcaatgccagggcagggcgcccgcagcgtttacaagttgcacagcgatccgtagattgcatcggggtcagcctttgttaccgaccaaaaggaaaactcagcagtgtccacccaaggccccgccgtatttacccagcgttaccgcgcctttctgtttgatatggacggcactttgctcaactccattgccgctgccgagcgcgtatggagcctctgggcagaacgccacggcctggatgtggcggcatttctcaagaccatccatggagcccgggcaattgacacgatcactcgccatgcgttacccggtgtcgaccctgatgtggaagcgcagtggatcactgaggctgagatcaatgacgtcgagggcatcgtggcgattcccggcgccaacgcatttttgaaccagctgcccgccgatcagtgggcgctggtcacgtctgcacccagggagctggcattgcgtcgcctgcaagcggcgggtatcgctcccccggttgtgctggtgacggctgaggatgtcgccaaaggcaagcccgacccggcctgttacctgctcggtgcgcagcgtttgggggtgccggtccaagattgcctggtattcgaagatgcaacggtggggattcaagcgggggaggccgcgggcgcgcaagtgatggtggtgacttcaacgcatttgcagccgatggcgacaacacatgcctgtattgaggcctatgacacgctgcaggtaagtcgtgacgctgatggcttattgtgtttgaagtgtctggcgtgatgacaggaagcggttgaggccttacttgcagtcggtcgaatccgaggaagcctggagccgactgcttttcatgccttggcgcgacagcaccatttctcggagtatttcgttggcgagccgagcaattgcctctgcgccgcgatagtgcgcgcgaacaattccggtaattgcaaaatgatcggtttccgggccgctgaggacggcagacagcgtgccgtcggcatgtagcgtacaggtgacactgtagctgggcaggcgggaagccaaggcagactcgatttcggatttactaagagtgtccatctgcgttggcacctctcactgaccgtgcaagccctagcatagatcgtgctgcgcgagtgtacataccgataatccgattgccggcatccgggtgttatcgtgcgattttctgatgggtacggtgatccgcgcgctggcacagtttacgcagaacgaccttctgcattggcttgaggcagaacacaaaaaggtagccactcagaaacagcgccaagtccagccatgaacgtttgccggggtcgcgaacatcttcaatttcgaatttcaagccatatcccagtgccacaaaagccagtccgatcaacaggacgatcatccaggatctggacacaaggggttgccttatcgcaggcctcatcggcgtactcctgaattcgctcggatggcaaggcagtagtcaggaggttcggctacaaaatatgtaacaagttccagacataaagatagtttcatctgttggcggtgcagggggtcgcaaggtgcgctggtcacgcgtgaacacgcggaacaggccaaaagggttttcgccagccgttacagtgaacgaaagggctggctactgagagtgcttcaaggcgtctggtttttgtccggagcagtcaggcctgcctggatgcgctggtaaatctcctcgcgatgcacggcaacatccttgggtgcgttgatgccgattcgtacttgctggccgctgacgcccaggatggtgatcgtgatgtcatcaccgatgtttatgctttcaccgactttgcgggtgagtataagcatggacttctccttgattacttttaaggacacatgtttcagacagggcagatgtcggatgtgtgtagcttactgctaagcgcttccctgtgactgcctcttttaggacgcatagaggcgacattaattcccatggcggcatcatacaggtctgcgatacatcattcgcattgtttaagccaacgtttatgacggccagaatagacagtgaatgataaagttgcctctttatcctcaaaggagcagggctgtgcgtaaagtagcgatggcaattgcggtgttggcattggccggttgcggtgaaggtaagagtgtcgatacgccaaaggccaagcctgccgtgaccgaaagccagtcgcaaaccggagtgattgccgcccaggaatgggatgtgtgggtcggcccgccagaccacaagttgcaggcgatcaccgacctgaccgcgtggttgctggaacacgggttcaatttttatatcgcgaaggtcgacggcaaggacgaagtgtttctggggccgttcgccagcaaggctgaagccgaggccaggcaagcgcagttgaatgagaaaatggctcgcgccaagaaaagcgacaccgaatccgaggtcgtcgagcacaaggtttcgcagtaggcgcaggctgggcggggttcccgcccattttcagccgcaggctttcaggttcaccgggccgacaaattcgttaccgcgccccatcacacaggccaccgtctggttacgctggcgctcccacgcctgcaccgggtaggtcttgttccaggcttcatacaattgacggtcctgttttgacaggcgcaaaccgtattgcttactcatgtagaagtaggtgcgggcgatcatccctcgaatcgacgggcgcggcatgacctttttggccttgaagtccacctgggtcaagcatgagccatattgtccgcgttgagcgggcaaccaaccaaaactgaagttgtttcggtcgccattgacctcgccgatgctgggcacgaggttatgcaggtcggcctcggcgcgtttgaacacttcatcccggcgcgtgcagttcttgcgtccaccgtcctgccagcactggcgttgatgcccgatctgccaggcggggacgatgtgttcccattcgatgcgtgcggcgcggctggcgtttttgcgcggaatgtagccgcaggctttcaggtccacacggttaccggtgtacttgcagccacaataaaattcggtggattgcggggcgtagagtttccaggcgacctttttggcctcgctgaacgtacgaggcgcctgagcattggcggtaacagcaaacagcaggcaaaacacagcgataaagcgggcaatcattgaatcagtcttcctttggtacaacccagaaaatctgcacgccgccgtcatcccgataggcgagggtgacgttgtcgttctctgcaatttcttccagcaaacgtgcccattcatcctcgggctcatccggcaaacggaagatcaaggcggccttggccttttgggcgttcgttgagttgatgattttctgcacacgaagggcgaggcgttcgtaggcatcgggcggggtgggtgctgcggaagaagactttgccacggagtattccttggtttgctgtacgtgcatacagtatttagctgtgggcaatttcgcaactacttaaagttctggtagttcttctgacggcgaccaaggcattttggtgtgaggcgcaacggggggaggcttgcgaggatgtagaggcgagcaaggcccgcctctacaaggatgtcaccaggaatcagtattcccagaacatccgttgcagctctttgctgtcctgggtcttggtcaaggcaaccatggccagaattcgcgctttctgtgggttcaggtcatgtgcgacaacccagtcgtacttgtcgtcaggctgttcggcgttgcgcagaacgaagccgccagcgttgacgtgggaagagcgaatgatctgcacgccttgcttgcgcaactcttgcaaggcagggacgactttggaggacaccgagccattgccggtaccggcatggatgatggctttggcgccggcttgggccagggctttgacggcggtgtcgcttacattgccgtagccgtaggcgatttccacgtcgggcaggctcttgatggtcttgatgtcgaattcggagtccagggtgtggcgcttggcaggcaggcggaaccagtaggatttgccttcaaccaccatgcccagcgggccccacgggcttttgaatgcttcggtcttgatgttgatcatcttgctgacatcgcgacccgactggatctcatcgttcatggtcaccagcacgcctttgccgcgtgcgtctttgctgcccgcgacggccacggcgttgtacaggttcagcatgccgtcagccgacattgcggtacctgggcgcatggaaccgacgaccacgattggcttgtcggttttttccaccaggttcaggaaataagcggtttcttccagcgtgtcggtgccgtgggtgatcacgataccgtccacgtccttgctgtcggccagttcggccacgcgccgacccaattgcagtaggttttcgttgttgatgctttcggacgcaatttgcatcacttgctcgccgcgtacattggcaatctggctaagctcaggaacgccggcgatcagttgttcgatgccgactttggccgcctggtacgtggcactgttggccgcactggcgccggcgccagcaatggtgccgccggtggcaaggatgaccacgttggagagtttggctttggtttcagcttcctttgcctgggcggcaacggggaacagcagcaggagggcgagggcgcccggaacaatgttcttcaatgcagatttcattatttttctctctggtttttgatgagtgcggtagcaggttcatctagaacacccgggcgtttttgaatgccacgaggtgctgagaaagagcaggatttgtaccaagctgattatgtttgtgctttttagttaagtaattgatttaaaacaattaaatgtgattttttgaaatgcctcggtgcggcgttgtccggctttccgaacggtggttcggtattgcgttcggttgcccgaaaaccatgatgaaataccgatgccgcgttgtatgaaggggctcttgcagtctgtcgttttaaagaacgacgagaggagggtgatgtttaatcgtttcagctgaatggcttaacggtgtcgccgggagggcctggatgaaaggtggttttctctcgttgacaaatctcgacaaggttctcatagtttgaataacgcaaacgtttgcgagatgtttcccggcgtactcctggagtcgcgtgacagctcgtatcagccacccgggtgggagggctgccgaagcgttcttcggtgcaagcgttgctcacaataatcataagatcggagtgaacccatgaagctgccattcgccggacgtcttcttgctgtcgctgtgcttgctgccgcatccgctgccctgcctctctcctctgcatttgccgatgacgctgccgccaaacccaagatcggcctggttatgaaatccctcgccaatgaattcttcgtgaccatgcaggacggcgccaaggcttaccagaaagaacacgccgccgatttcgacatgatcaccaacgggatcaagaacgaaaccgataccagtgcgcagatcgatatcgtcaaccagatgattctcgccaaggtcaacgcgatcgtgatcgcgccggccgactccaaggcgctggtcaccgtgctgaagaaggcctccgataaaggcatcaaggtcgtcaacatcgacaaccgccttgatgtggacgtgctgaaaagcaaatccctgaatatcccgttcgtggggccagacaaccgcaaaggcgctcgtctggtgggtgaagaactcgccaaacacctcacaaagggcgatgaggttgccatcatcgaaggcgtgtccaccaccaccaatgcccagcaacgcaccgcaggcttcaaggatgcgatggacgctgccggcatgaagatcgtttccacccagtccggtgagtgggaaatcgacaagggcaacgccatcgccgccgcaatgctccaggccaacccgaacatcaaggccctgctggccggcaatgacaacatggccctcggtgctgtctctgccgtgcgtggcgcaggcaaggcgggcaaggtactggttgtaggctacgacaacatcgaagccatcaagccgatgctgcaggacggccgtgtactggcgactgccgaccaggctgccgcccagcaagcggtgttcggtatccagaacgcgctgaagctggtcaagggtgaaaaagtcgatgcggttgacggcatgatcgaaaccccggtcgaactcgtcctcaagaagtaatcctggcagcacccaacagcgcccgctcgtcctgagcgggcgcctggagattttcctatgtcatcttccgccccgaacgctgtcctctcggtcagcggtatcggcaagacctatgcccagccggttctgtccgacatcacactgacgctcaatcgcggggaagtgctggcgctgaccggtgagaacggcgcaggtaaaagcacgttgtcgaaaatcatcggcgggctggtcacgccgaccgccgggaacatgcagttcaatggccaggattaccgtccgggcagccgcacccaggccgaagggctgggcgtgcgcatggtcatgcaggagctcaacctgttgccgaccctgactgtggccgaaaacctgttcctggataacctgcccagccacggcggctggatcagccgcaagcaactgcgtaaagctgcgatcgaggccatggcccaggtcggcctggatgcgatcgacccggacactctggttggcagcctgggcatcggccaccaacaaatggtcgaaatcgcccgtaacctgatcggcgactgccatgtactgatcctcgacgaacccacggccatgctgacggcgcgtgaagtcgagatgctgtttgaacaaatcacccgcctgcaagcccggggcgtggcgatcatttatatttcacatcggctcgaagagctggcccgtgtcgcccaacgcattgcggtattgcgtgatggcaagctggtctgcgtcgagccaatggccaattacaacagcgagcaactggtcaccttgatggtcggtcgcgaactgggcgagcagatcgacctgggcccgcgcactatcggcgcccctgcattgacggtggcggggctgacccgttcggacaaggttcgtgacgtttcctttgaagtgcgtgccggcgaaatctacggcatctccggcctgatcggcgccggccgcactgagttgttgcgcctgatcttcggtgccgacattgccgacagcggcaccgtggcgctcggctcgccggccaaggtggtgagtattcgctcgcctgtggacgcggtaggccatggcattgccctgatcaccgaagaccgcaagggcgaaggtttgctgctgactcaatcgatcagcgccaacattgccctgggtaacatgccgaaaatttccggtggcggcgtggtgaacagtcgcgacgaaacggccttggccaagcgccaggtcgatgccatgcgtattcgcagttccagcccggcccaactggtttccgagctgtcgggcggtaaccagcaaaaagtcgtgattggccgctggctggaacgtgactgcgcggtgatgttgttcgatgagccaacccgaggcatcgacgtgggtgccaagttcgatatttatgccttgctcggcgaactgactcgccagggcaaagcgctggtggtggtgtccagtgacctgcgcgagctgatgctgatctgcgatcgcatcggcgtattgtccgccgggcgcttgatcgagaccttcgagcgcgacagctggacccaggacgaattgctcgccgccgcgtttgccggctatcaaaaacgtgatgcgctgctcaacgacgcagtgcttagggaaaccccatgaaaaccacacattcccccgctaaagcgggtggcaacttctacggcctgggtacctatctgggactggccggtgccttgctggcgatgattgcgctgttttcggtgctgagcgatcacttcctttcctacgataccttcagcacgctggccaaccagatccctgacctgatggtgctggcagtcggcatgacctttgtcttgatcatcggcggcatcgacctgtcggtgggctcggtgctggccctggcggcgtcggcggtcagcgtggccattctcggttggggctggagcgtattgccggccgccttgctcggaatgggttgcgcggcgttggccggtaccgtcaccggttcgatcaccgtggcctggcgcattccgtcgtttatcgtgtccctgggcgtgctcgaaatggcacgtggcgtggcctaccagatgaccggctcgcgtacggcctacatcggtgactcgtttgcctggctgtccaacccggtggccttcggtatttcgccgtcctttatcattgccttgctggtgatcatcgctgcgcagcttgtattgacgcgtaccgtgtttggtcgttatctgatcggtatcggcaccaacgaagaagctgtacgcctggccgggatcaacccaaagccctacaaaatcctggtgttcagcctgatgggcctgctggccggtgtggcggcactgttccagatttcgcgcctggaagcggcggacccgaatgccggctccggccttgaattgcaggtgatcgcggctgtggtcatcggcggcaccagcctgatgggcgggcgcggctcggttatcagtactttctttggtgtattgatcatttcggtactggccgccggccttgcgcaaatcggcgccacggaacctacgaagcgcattatcaccggtgccgtgatcgtgattgcggtggttctggacacctaccgcagccagcgcgccagccggcgaggctaagccatggcaacgatcaaggatgtggcagcgcttgcgggtatttcctacaccaccgtctcccatgtggtgaacaagacgcgcccggtcagcgagcctgtgcggatcaaggtcgaagcggctatcaagcagttggactacgtgccgagcgcagtagcgcgctcgctcaaggccaagacgactgcgaccatcggcctgctggtgcccaacagcctcaacccgtactttgcagaattggcccgcggcatcgaggattactgtgaacgcaatggctactgcgtgatcctgtgcaactctgacgacaacgctgaaaagcagcgcagttacttgcgcgtgttgctggaaaagcgcatcgacggcttgatcgtgacttccgtgggcggcgacgacagcggcctcgccgcaggcttgagcgcagtgcgcacgcccatggtgattgtcgaccgagcgctggatgggatcgatgtggacctggtgcgtatcgaccacgaggagggcgcttacctggcgacccggcatttgcttgagctgggccaccgggatatcgcctgcataggcggccctgctcatacccgcgtggcgcaaatgcgtctggcgggctatcaccgcgcgctgcgtgaagcgggtgtagaggtgaggcccgaccgtacccgcgaaagcgatttcaccagcacgggcggttatgccgcagcggtgcaactgctggcggacaacccacccagcgcaattttcgccagcaacgacatgattggtttcggcgtattgcgcgccgctgcagaacgcaatatccgcgtgccgggcgagctgtcggtgatcggctttgatgacattcaaatgggccgctacgtgtacccggcactaaccacggtcgggcaatcgatcgtgcagttgggcgaaacggcggccgagcttttattgcaaagaattgcgacaccccaactgccgatcgatcagcgcatcgtgacgccgagcatcgtattgcgtgagtccacggcgccgttcgccggcgtgttcgcccaataccgctgaaccgaattgatgagtactgatgtatgccagcaaaagtagtggtaataggcagcttgaacatggacctggtcacccgcgccagccggttgccgcgtgccggtgaaaccctgattggccagacgttctccaccgttcctggcggtaagggggctaaccaggcggtggcgtcggcgcgtctgggcgctgatgtggcgatgatcgggtgcgtcggcaccgatgcctacggcacccaattgcgtgatgccttgttggtggaaggcattgattgccaggccgtcagcaccgtggaaggctccagcggtgtggcgctgatcgttgtcgatgacagcagccagaacgcaattgtgatcgtagccggcagcaatggtgagctgacgcctgcttcgttgcaggtggctgacgcagtgttgcaggctggcgacgtgattgtctgccagctggaagtgccgatggacactgtcggtcatgcgctcaagcgcggccgcgagctgggcaagacggtgatcctgaacccggcgcctgccagtggaccgttgccagctgactggtacgcctcggtcgattacctgattcccaacgaaagtgaagccaccgccttgagcggtataacggtcgactccctcgacagtgccaagctcgctgcaactcagttgatcaaggccggagcaggcaaggtcatcatcactctgggttcgcaaggcactttattcgccgatggccaaagctttgagcacctggctgcgccaaaggtcaaggcggtggacaccacggctgccggtgacacctttgtcggcggtttcgccgcggcactggctgatggcaaaagcgaagccgaggccatccggttcggccaggtcgcggcggcattgtcggtgacccgtgccggtgcgcaaccctcaattcctaagctgcacgacgttcaaggttttgtgccctcatgaaaaagacacctctgctcaatatcgccctctcgcgcgtgattgcgtccctggggcacggcgacatcctggtcattggtgacgccggtctgccggtgccgccgggcgtcgaattgatcgacctggcgctgacccagggcattccggatttcatcagcaccttgcgcattgtgctcagcgagatgcaggtggaaagccacgtgctggcggaagaaatcctgcttaagcagccgccggcgctgacagacctcaacaccttgactgaacaggccgctttgggcgaacgccggctggtcagccatgaagagttcaagcaattgagccgcagggctcgtgccgtcgttcgcacaggcgaatgccagccttactgcaatatcgcgctggtctccggcgttacgttctagcgattccctacgacaaggagtgtttcatgcaacgtggtcttccaaccctgaaaaacctgtttcggagtgtcctgcttttgtccgcactcactgcagccagcgcccactcggcggaaaaaatcgaccttatcatcgacaccgacccgggtgccgatgatgtggtcgccttgctcttcgccatggcctctcctgaggaactgagcatccgtgcgctgaccaccgtcgccggtaacgtgcgcctggacaaaacctcccgcaacgcgcgcctggcccgcgagtgggcagggcgcgaggacatcccggtgtacgcaggggctcccgcgccgctgctgcgcaagccgatctatgccgagaacattcatggcaaggaaggcatctcgggcgtgacggtgcatgaaccgaaaaaaggcctggccgaaggcaatgcggttgattacctgatcaagaccctgagcaccgccaagccgcacagcatcaccatcgccatgctcggcccgcaaaccaacctggcactggcactgacccaggcccccgaaattacccagggcatcaaggaagtggtggtgatgggcggcgcgcacttcaacggcggcaacattacgccggtggcggaattcaacctgtttgccgacccggtggcggcggagattgtgcttaaaagcggcgtgaagctaacttacctgccgctggacgtgacccataaggtcctgaccagcgaggctcgcctgaagaagatcgcggatctgaacaacaatgcgagcaaggtcgtcagcagcattctcaacgaatacgtcaaaggcgacatggagcattacggcatccctggtggcccggtacacgacgccacagtggttgcctatctgctcaagcccgagctgttcaccggccgcgacgtcaacgttgtggtagacagccgcgaaggcccgaccttcgggcagaccatcgtcgactggtacgatggcctgaaacagccgaagaatgcgttctgggttgagaacggcaacgcccagggctttttcgatctgctgaccgaacgcctcgcgcgcttgaaataacgtgtgtgccggtcggcgctcgccgaccggttcttattcgcgctcggggttatgagcccccatgtgatccgccgggtatttctcgaaaatctggccgatgaacgcttgcgcagcctgggtccccagttccttgaccagcaggtcgataccaatgattgccagctcctccgggcttccggggctgtaggagctttgtccttggggccacttggctttgatgtcggcttgcagggttacggtggtcatgggtgtctcgcgagctggaagtacggggcaatgcgctaaaacgcggttttcaccccggcagttaaccattttgcgcggtgtttggcactgcgacttaggcatgaagggagtgctgtgcgacactgtgcccctgtccaattgccgggaaacaccgcgtgcagatcgatttgaacaaccccgaaaacctgacgctggccgccgtgcgccaattgatcgccagcgccagcgacgatgagcatacccagctgagagtgaccaaggagggtatcgcctatatctcttccggcagcgtcgtggggggtgtagagatcgaagggctgctgtttcgccttgaaacctgggccaagggctccggttatgtcggtaacgtggccgcgagcgacgaagtatgggtcacgcagattttcaatgccttgcagcagaactggccgaagcctgcgttcgactacatcgatatctattgagcacgttcatatctggtcacgattgactggacgaacgccgcttgagagtcaggcagacttgccctgtgcggtttacgtcttgaaaccaatccgacatatagctgtcgcacgatctctgtccatttttatcataggaggcttcatgccttggaagctcgcatcattcggtactttgttggcagcactcgcgttggcgggttgcagcaccccgggtgcctctgtgccagctaaagacgccgccgtgaccgaagcaggcagtggtcgctgtgagtcaaaggctgccgagttcgcagtcggtcaaaccgcctctccccagttgctggagcaggcacgtgcccgttccggtgcgcagaatgcacgcattctcaaacccaatgacatggtcacccttgaataccgctccgatcgcttgaacctgaacaccgacgacaagatggtgattacgcgggtcaactgcggctgaaacaccacagcttttgcagcgcccataaaaaaccccgtcacatggacggggtttttttagctcagcggagaattactcgccgcgaacctgtgcagcttgcatacccttttggcctttctcagccacgaaggaaacggtttggccttctttcaggcttttgaaaccgtcgctttcgatagctttgaagtgtacgaacaggtcgtcaccgccaccttgaggagtgatgaagccgaagcctttttcatcgttgaaccatttaacggtgccggtttggcgattagacatggtgtatctccaagaaacatatattttcagtagtgctgtgctgctcaggccaactgggcacaccgggctatcatagtcgaaatgttcggcttgggagcccccccaaggcattgtttgctaatcaatagcgttgcgtttaatcccttggtcggctgtaagccccgatctacggggctttggcgcaaaatatcgactgttaaaaaaagccgtaaaagctgcgtaatttgtgagaaatggcagttttcaggccgtttttccagccaaatgcttgcctgaacgtgggtcgatcttactttttcttcacgactttgcaggacgaaatagccgcgacggctttgtttttaagctcctggctggcgttctggttggtcatgagttccttgatttcggcagtgctcaactcggcgttgattttgtctgcgccacattcgcaatgatctttggcggttttagcgtctacgttctggctggcggctgcactgcagtcgctgacgaagctgtcgcgggcaccggccggccagttcgacggagctgctgcctgagcaccgaaagacaggaaggccagggaagcggcgagggcgagtgtcgaggtaaaacgcatcatgtggatgctcctttgggtcgaggacgaacggcgattctcagtgggtttgaggcttggcgtacagcccaagttcacttttgcggcaataaaggctggaatttgtatttcgtaaggcagtgccggcacgatgaccgttcatctgtgctagcatcgttcgcctggctatttcccggtgtgccatgtgccgccttgccaggttcttttcagttcactccagtcactctggttcgattatcggttggccgaaaggctcctgccgctgtaaggcaggcgttcatcactgaacggcctggtattggatcttgtactggctcatcccaacccacgtgacctttggtaggggtcaccactaggagaggaggcgccatgccaactattactcttcccgacggcagtcaacgttcattcgatcattcggtttccgtagccgaggtcgccgcatccattggtgcaggcctggccaaagccaccgtggccggcaaggtcgacggcaagctggttgacgccagcgacctgatcaccactgatgccagcctgcaaatcatcacgcccaaggatcaagaggggctggagatcattcgccactcttgtgcacacttgattggccacgcagtcaagcagctgtatccaaccgcgaaaatggtcatcggtccggtcatcgatgaaggcttctattacgatatcgcctatgagcgtcctttcacgccggacgacttggccgctatcgagcagcgcatgcacgcgctgatcgaaaaagattacgacgtgatcaagaaggtcacgccgcgtgccgaagtgatcgacgtgttcaccgcccgtggcgaagactacaagttgcgtctggtggaagacatgccggacgaacaggccatgggcctgtattaccacgaagaatatgtcgacatgtgccgtggcccgcacgtgccgaacacgcgcttcctgaagtcgttcaagctaaccaaactgtccggtgcctactggcgcggcgacgcgaagaacgagcaactgcagcggatctacggcacggcctgggctgacaagaagcagctggcggcctacatccagcgcatcgaagaagccgaaaaacgcgaccaccgcaagatcggcaagcgcctgaacctgttccacctccaggaagaagcgccgggcatggtgttctggcacccgaatggctggactctgtaccaagtgcttgagcaatacatgcgcaaggttcagcgcgacaacggttacctggagatcaagactccgcaagtcgttgaccgtagcctgtgggagaaatccgggcactgggccaactacgccgacaacatgttcaccacccagtcggaaaaccgcgactacgccatcaagccgatgaactgcccgtgccacgtgcaggtgttcaaccagggcctgaagagctaccgcgagttgccgctgcgcctggccgagttcggtgcttgccaccgaaacgagccctcgggtgcgctgcacggcatcatgcgggtgcgtggtttcacacaagacgacgcccacatcttctgcaccgaagaacaaatgcaggccgagtctgcggcgttcatcaagctgaccatggacgtgtatcgcgatttcggctttaccgaagtcgaaatgaagctgtccactcgtccggaaaaacgcgttggctccgacgagctgtgggatcgcgctgaatctgcactggccgctgcgctcgacagtgcgggcctctcgtacgacctgcagccgggggagggcgcattctacggtccgaagatcgagttctcgctgaaagattgccttggccgcgtctggcagtgtggtaccctgcagctcgattttaacctgccgatccgtctgggagccgaatacgtctccgaagacaacagccgtaaacacccggttatgctgcaccgggcgatcctcggctcgttcgaacggttcgtcgggatcctgatcgagcactacgagggtgcattccctgcgtggctggctccgacccaggcagtgatcatgaatatcactgataagcaggcagattttgccgctgaagttgaaaaaactctcaatgaaagcgggtttcgtgccaagtccgacttgagaaatgaaaagatcggctttaaaatccgcgagcatactttgctcaaggttccctatcttttggttatcggagatcgggaagtcgagatgcagactgtcgctgtgcgtactcgtgaaggtgctgacctgggctcgatgcccgtcgcccagttcgctgagttcctcgcgcaagcggtttcccggcgtggtcgcccagattcggagtaattattattaagcgtgaaatgagacaagataaacgagctgcaccgaaagccccgatcaacgagaatatctcggcacgcgaggttcggttaattggcgctgacggcgagcagattggcatcgtctcgattgatgaagcgcttcgtattgctgaagagtccaaactggacctggtggaaatctccgccgatgcaatcccacctgtttgtcgggtgatggactacggcaaatcgatcttcgaaaagaagaaacaggttgccgcagcgaagaagaaccagaagcagattcaagtaaaagaaatcaagtttcgtccagggacggaggaaggggattaccaggtaaaactgcgcaacctggtacgtttcctgagtgatggggacagggccaaggtatccttgcgattccgcggccgtgagatggcccaccaggagctggggatggaactcctcaagcgggttgaagctgacctgctggagtacggttccgtcgagcagcatcctaagatggaaggacgccagctgatcatggtcatcgccccgaaaaagaagaagtaatcaacagggcacggcaggccttctgattatgtttatcaactgaatgcggagtatccgaacatgccaaagatgaagactaaaagtggtgctgctaagcggtttctgaaaactgctaacggtatcaagcacaagcacgctttcaagagccacatcctgaccaaaatgtcgaccaagcgtaagcgtcaactgcgcggtagcagcttgctgcatccgtctgacgtggcaaaagtcgagcgcatgctgcgccttcgttaatttttggatcaagatagaggaaataactcatggctcgtgtaaagcgtggcgtcattgcccgtaaacgtcacaaaaaaattctgaaactcgctaaaggctactacggcgcgcgttcacgcgtattccgtgttgccaagcaagcggtaatcaaggcaggccaatacgcctaccgtgaccgtcgtcagaaaaaacgtcagttccgcgctctgtggatcgctcgtatcaacgccggtgcacgtgttaacggtctgtcctacagccgtttcatcgctggcctgaaaaaagcgtccatcgaaatcgaccgtaaggtcctggctgaactggccgtgaacgaaaaagcggtgtttgctgcgattgtcgagaaagctaaagccaccttggcttaagtacccccgacagtcatcttgagctgctgcagcccaaggtggtaaacgtcttaaataggggaagagccttcaagctcttcccctattttgtatctggagtctgtacatggaaaacctggacgcgctcgtcgctcaagctcttgaggctgtgcaaagcgctgaagatatcaatgccctggagcaaatccgggttcactaccttggcaaaaagggtgaattgactcaggtgatgaagaccctggggaatttgccggctgaagagcgtccgcaagtcggtgcgctgatcaacgtcgccaaggagcgtgttacagaggttctcaatgcgcgcaaggcgtcgctcgaggaggctgatcttgcggccaagctcgccgccgagtccattgacgtgaccctgcctggccgtggccagacctcgggcggcctgcatccgattacccggactctggaacgcatcgagcagttcttcacccacattggctacggcatcgccgaaggccccgaggtcgaagacgattatcacaacttcgaggcgctcaacatcccaggccatcacccggcccggtcgatgcatgacaccttctatttcaatgccaacatgctgctgcgcacccatacctcgccggtacaggtccgcaccatggaagcgaacaagccgccgatccgcatcgtctgccctggccgtgtgtaccgtagcgactcggatatcacccactcgccgatgttccaccaggttgaaggcctgctggttgaccgcgacatcaatttcgccgacctcaaaggcaccatcgaagaattcctgcgggtgttcttcgagaaggagctggcggtgcgtttccgcccgtcgttcttcccgttcactgagccatccgctgaagtcgacatggagtgcgtgatgtgcagcggcaaaggctgccgcgtctgcaagcagaccggctggctggaagtgatgggctgcggcatggtccatccgaacgtgctgcgcatgtccgggatcgacccggaagagttctcgggctttgccttcggcatgggcgttgagcgtctggccatgctgcgttacggcgtgaacgacttgcgtctgttcttcgacaacgacttgcggttcctcgcgcaatttcgctagtcgtaacgaatctttaggagagcaggatgaaattcagtgaacaatggctgcgtggctgggtaagcccgcaggtaagtcgcgacgagctggttgcccgtctgtcgatggccggccttgaggtcgatagcgttacgccggccgccggtgttttcagtggcgtggttgtgggcgaggtgctgagcaccgagcagcaccccgacgccgacaagttgcgtgtatgccaggtcagcaatggcgcggagacttttcaggtcgtgtgcggagcgccaaacgtgcgcccgggcctgaaaattccgttcgccatgatcggcgccgaactgccgggcgacttcaagatcaagaaggccaagctgcgtggcgttgagtccaatggcatgctgtgctcccaggcggagctgcaggtcggcgaaggcaatgatggcctgatggagctgccggccgacgcgccagtaggccaggacatccgcgtgtacctggaactggaagacgccagcatcgaggtcgacctgaccccgaaccgtggtgattgcctgtccttggctggcttggcccgtgaagtgggtgcgctgtacaacgccccggtcacccgcccggtcgttgacgctgtgcctgcgatacacgacgaagtacgcccgatcgaagtgctggcgcccaatgcctgcccgcgttacctgggtcgtgtgatccgtaacgtcgacctgtccaggccaaccccgctgtggatggtcgaacgcctgcgccgggccgacgtgcgcagcatcgacgctgccgtcgacatcaccaactacgtgatgctggagctgggccaaccgctgcacgcgttcgatctcgccgaaatcaacggcggtatccgcgtgcgcatggctgaagaaggcgaaaagctggtcctgctcgatggtcaggaagtcagcttgcgggccgacaccctggtgatcgctgaccactcccgtgccctggccattgccggcgtgatgggtggcgagcacagcggtgtttcggacacgactcgcgatgtattcctcgaaagcgcctttttcgatcagatcgccatcgctggcaaggcccgttcctacggcctgcacaccgatgcctcgcaccgctacgagcgtggcgtggactggaagctcgcccgtgaagccatggagcgcgccactggcctgttgctggacatcactggtggtgaagctggcccgatcactgaaaccgtcaacgagcagttcttgccgtccgttgcgccgattaccttgcgcgccaagagcgtcgagcaaatgctcggcctggtaattgcgccggctgaaatcgagcaactgctgtcggccctcggcctgagcattaccgctggtggggaagggcagtggcacgttgaagtgccaagccatcgcttcgatatcagcctggaagttgacctgatcgaagaactggcccgcctgtacggctacaaccgcctgccggttcgttacccgcaagcgcgcctggcgccacagcccaaagccgaggcgcgtgcacacctgccggagctgcgtcgtctgttggttgcccgtggttaccaggaagccgtgacctacagcttcattgatccgaagcagttcgaactgttcaacccgggcgttgagccgctgttgttggccaacccgatctccaacgacatggccgccatgcgttcgtctctctggccaggtttggtgaaagcactttcccataacctgaaccgtcagcaagaccgcgtgcgcatgtttgaaagcggcctgcgttttgtgggtcagctggatggcttgaagcaagagccgatgctcgcgggcgtagtctgcggtagtcgcttgccggaaggctgggcgcaaggccgtgacacggtggacttcttcgacgttaaggctgacgtggaagcggtactgggctttgccggtgcactgggcgacttcaagtttgtcccaggcagccatcctgccttgcaccctggccagactgcacgcatcgagcgcgaaggtcgcttggtgggtttcgtcggcgccattcacccagagctgtcgaaaaccctgggtctggaccgtccagtcttcgtttttgagctggtcctggctgaagtggcgtcgggcaaaatgcctaagttcagtgagttgtcgcgcttccctgaagtgcgccgcgacctggccctgatcgccgaccgtgaagtggccgccactgccgttctggatgtaatccgtgaaaatgcaggggaatggctgacagacctcaggctatttgacgtttatcagggtaaaggcattgatccgcatagaaaaagccttgcagttggcttgacctggcagcatccatcgcgcactcttaatgacgatgaggtgaataccacgacacaaaatatcctcacctcgctcgaacaaaggttgaacgccacgttaaggaagtgacgtatgggggctttgacgaaagctgagatggcggaacgtctgtacgaagagctgggtctgaacaagcgtgaggccaaggaattggtcgagttgttctttgaagaaattcggcacgctctggaagacaacgaacaggtcaaattgtccggtttcggcaattttgaccttcgggacaaacgccagcggcctggccgcaatccaaaaacgggagaagaaatcccgatcacggctcgccgtgtggtcacctttcgtccagggcagaagttgaaggcccgagttgaggcttatgctggaaccaagtcataacgacgaactacccgtcatcccgggcaaacgctacttcaccattggtgaagtcagcgagctctgtgcggtaaaaccgcacgtgctgcgctattgggagcaggagtttcctcaactcaaccccgtcaaacgtaccgggaaccgtcggtattatcagcgccaggatgtgctgatgatccggcagatccgtgcgttgctgtacgatcaggggttcaccatcagcggcgcgcgccagcgcatgtccggtgatgaagccaaagacgacaccacccaatacaaacaactgatccgccagatgatctccgagctcgaagatgtgctggtggttttgaagaagtgattcaagcttttaaaatacttccacatttcaaaagcttgcggtatattccggttcgcttcgtcaagaagcgaacccagtaacacgcctagtcggggcgtagcgcagtccggtagcgcactagcatggggtgctaggggtcgagtgttcgaatcactccgtcccgaccatattttcgataaaacccagcctgaaaaggttgggttttttcatgcccgtacaaaacaactaatccgcgaaaaacaccaacgctcgcaactcaatactccgacgaggcggtgcatccgttggcgtggtggggtcgtcaaacgctgtatgcgcactcagcctggccacgtcgcggcgcgagtcgtagatcttcagcaataaggcctcatccgggcgtaactgcgggtagtaataccaacggtgcgccgggttggccttgactgaaaacgtttcgccgaccttgtcgcggtagaccaggtcgctggctaacaagtcgctatctgccatgctgcgcgcatcgcacagggcgagcggcgtgctgaagaccggcgcgccaatgggtcgccagacgttgatgatcgcaaaccgccccgataatcgttgctctgcctcgtcagctggcaggtgatcgcgcactcggcggatggccgaacgctgtgtctggtcgttgtgcacgtagcgcacgggttcgcgcaggccgcgcgcttcgcggccggggtcgtcgacgcggatcgtgtgatcgaatatcaccaccttcacggctccggtttgctgtttgagcaacgcttcgatttccgggtagtagtgttggcggacttgggcgtcgtcttccaggttcgtcacgttactggcgtgatcaactttctcgaaaccctggcgattgatacttgcgggctcgtcgagcagccgcgcgttgtggacggtcacctcggtcgggtccagtacgccgctgcgctgggcggcgccttctggggcggggtaggtgtagtttaccgggcgctcgccggtgtcctgcaggtaattgagcacaccgcgcaccgaacggggtgccagttgagcttgatgggttcccatgagccacctccaaaggtcagaacggttccttgaacggccgcaggtccagctcctgggtccaggcgctgcgcggttgggtgtgcaaataccagtaggcgtcagcgatgtcgtcgagtttcaaggcgccgtcttcgcccagccgctcaagataatcggcggcccggctgcggactttttcaccgtcgatggagccgtcgatgaccacatgggccacatgcacgttctgcggcccgaactcccgggcaaatgactggctcagcgagcgcaagccggctttcccggcggcaaacgcagcatagggtggcttgccgcgcagcgacgcagtggccccggtgaacagcaggcttccgccgccattggccagcagcgaacgggtcgcctcgcgggcaaacaaaaagccgcccagggtcgaggcgcgccaggtttgctcgaacagttccgcgctcagttgcagggttggcgctgaaaccgcattgccgacgttgaaaatcgccgccttgagcgtgccgagctggttcacctgagcgacagccgcgacgacctcagcctcgacgcccgagtcggcggcaatcgcatttgcgcggcccccggacgcctcgatatcggcgaccaccgcctgcaatttgtccaggctcctgccgctgaccgccacgcgataaccctcacgggcaaaccttcgcgccaaggctgcgcccaatcccgcgacggcaccgacaccggcaatccacaccactgactcagacatttgccactgctccactgaagtacgtggttaacaatctacccatcgcatcgcgcgaggaataagaacatcgacagctaaggttatgcttccggctttgatcgaaaagattggcgaaagcctgtccccttttttcacttcgcctgtcattccaggcaagtgaacaaatcgagagcttcctccaatgcccgcagtcccacctttgcgcttgcgcccgttactcaacctgagcctgttgttgagcctcagcaccagcccgttatttgtggccgtcagctatgccgaagacacgtccacccgccgcagttatcaggtaccggccggcagcctgagcgcagccttgacccggtttgcggggttggtcggcgtcaacctgtcagtcgatccggcgctcgtgagcggccgcagcagcagtggtttgtccggcgagtacggcgtggaggaggggttcgcgcatttgctgcagggctccggcctgcaattgcagccactgggcgagcaggcttacaggttgttgccggtgccagagggcggcagcttgcagctggcgccgacgtctattcttggcaccaccggcctggccgacggcgatgcctacgccggcgggcaagtggcacggcgtggctcccagggactgctgggttcacgggatttcatggagaccccgttcagcatgaccacctacaccgcgcaggcggtgaaaaaccagcaggcgcgcaccctcggcgatttgatcgccagcgacccgtcggtacgcgccaccaacccggccggtgggcgctatgagcagttcaccattcgcggcttcagcctgttcaacagcgatgtggcttacaacggcctgtacggtgttttaccgacctacaccatcgacatggaaatggccgaccgcgttgatatcctcaaaggcccgagccaattgatcaacggcatctcgccgcgcggcagcgtgggcggcggcatcaacgtggtgcccaagcgcgccactgacaaggccatcacctcattgacgggcacttgggcatccggcagccaggcgggtggcgcggtggatgtggggcggcgctttggcgaagacaacaaatttggcctgcgcttcaacggcgtcaagcagtccggcgataccgaatgggaccaccagagcgtcgaccgtgaaatggcggtagtgggcctggattttcgtggcgagcgcctgcgcctctccaccgatatcggccacaccgagcgtgacaccgatgccccgcaggagcgtgtgcaggtcggcgccaatgccagggtgccgagcgccaatgatgtgcgccgcaactatgcgcagccgtggagcaacgccagcacccgagacaccttcggcaccgtcaacggtgagttcgacctcaatgacagcgtgatgctgtatggcggcgtcggcacgcgcaaaagcaaccacgacttcctgcgccatgcggtagcggtcaccaataacgccggggatttcagcgtgcagccccgggatttcacccgtgacgaaaatgtgcgtaccgccacggcgggcgtacgcagctggtttcacaccgggccggtcagccatgaggttaacctggcggccagctatttctatatggacttcgaaaacggcggcgcccgttacgcagctgcgccgagcaacctttacaacccggtgcaaaccccgacgccctcccggccgacgcgctttgattccagggtctacaccgaaaaccgcttcagtggcgtggcgctgtccgataccctgggcttctttgacgaccgcctgctgctcacgctcggcgcgcgctggcagcgcgtgaaggtggatgactggaccgacgacgtcaaaggcgacactgcctatgacgaagaaaaaatctcgccctcgggcggcattttgttcaaggccaccgacacactgtcgctgtatgccaactacatggaaggcttgagccagggcaagatcgcgccgtccacgtcggtcaacgaagatgagatcttcccgcccttcatcagccgccaggtcgaggtcggtgccaaatacgatgcaggtgctttcgctgtgaccgctgcggtgttccgcatcaaacagccggcctatgagaccaatgccaccacccgcgtgttcggccccaacggcaagcgccagaacgatggcgtggagttgagcgtgttcggtgaaccgctgaagggcgttcggctgctcggtggggtgatggtcatcgacagcgagctgacccataccaccaacggcaccttcgacggcaaccgtgcgccggccacacccaaatacaacgtcaacctgggggccgaatgggatgtgccgacagtggaggggctgaccctgaccagccggggcatctattccagctcgcagtacctcgaccagtccaacgtcaagcaaatcgacgcctggaaccgtatcgacgtgggcgcgcgctatgccttcaagttggatgaaaaaaacatcaccttgcgcgcgaatgtggagaacgtcgccgataaacgctattggagctcggctggggcgtcggatgacagcgagccaggcttgacgttatcgacgccgagaacctacctgctctcggccacggttgatttctaatcgctgatcctgatgtgtgcgggtttttgtgggagctggcttgcctgcgatagcatcacctgcgtacctctgaaacaccgaggtgtctgcatcgcaggcaagccagctcccacacaagccagctcccacacaagccagctcccacacaagccagctcccacacaagccagctcccacaaaaagcccgcccaacgcccggtggggcgccaatgagaatgttttttgattgcgccgccccgatatggaatagtacccgccgttttccccggcctgtctagctggggtgttttaacgccgaggtccttgtcatgcgaatgctgcgctccatccccaccctggccgcctgcctcctggcgttctcttcaagcgtgttgagcgctgctcccatcgacctcaacgacggccagcacgccgtgcacctgccggacgcacccaagcgtgtggtggtgctggagttctcctttctcgacagcctggcggccgttgatgtgacacctgtgggcgccgccgacgatggcgacgccaaccgcgtcctgcctcgcgtgcgccaggccatcggccagtggaagtccgtcggtttgcgctcgcagccgagcatcgaggaaatcgcccggctcaaaccggacttgatcgtggctgacctcaaccgccatcaggcgttgtacagcgacctggcgagcatcgcgccaacgctgttgctgccctcgcgcggtgaggactatgagggcagcctcaaatccgccgagctgatcggcaaggccctgggcaagagcccgcagatgcaagcgcgcattgtgcagaaccgtgaccacctgaaagccatcgcacagcagatccctgccggtgccagtgtgctgttcggcgtggcgcgcgaagacagtttttccgtacacggccctgactcctacgccggcagcgtgctgcaagccatcggcctgaaagtgccgtcggtgcgcgccaaggccgcgcccaccgaatttgtcagcctggagcaactgctggcgctggacccgggttggttgctggtgggtcattaccgtcgcccaagcatcgtcgacacctggagcaagcagccgttgtggcaagtgctcggtgcggtgcgtaatcatcacgtcgctgaagtcgatggcgacagctgggcgcgcaaccgtggcgtactcgcctccgagcaaattgccgaagatgccctggcaatccttcagggcggcaaagccgtactgagtcaataagcatgcaacgcagcgttgccgccgtcggcattgtattgctgggcgccttgttgttctggttctcgttgtacagctggtcaccgttcaccattacttccacggatgcctggaacggtctggttcatcagggcagcgtgggcggcaatatggcctatatcgtcgctcagttgcgggtgccgcgcgcggtttgcgccgcgctggtgggcgcctgcctgggcctggccggcgcgctgatgcagggcatcacgcgcaaccgcctggcgtcgccttcgttgttcggcgtcacggcaggggcggcgttggggctggcgctgttttcgaccggcctggttgcgccgccctttgccggcggggccttgttgatgacgtgtgtgggcggcgcgctggcctggatcacggtgttcagcctcggtggcgcgtggtcgccgaccacggcgcaggggcgtctggtgttggccggtgtggccgttgccgcgttatgcgcagccctgacccggctcaccgtgattctggtcgaggcccaggcgcaaagcgtattgaactggctggccggctcgctggccaacgttggcgtcgcgcaagtccagttgctctggccctgcaccctgatcggcggcctgtgggccctgtggtgtgcgccgcgcctgaacctgatcaacctgggtgaagacgccgcacgctccctcggcgtgggcattgccagcctgcgcctgcaggtgtttgtcgccagccttctgctggtgggcgccagcgtttgcgcggtcggccccatcggttttgtcgggttgattgcgccgaacatcattcgccagtttctcggtaacgactaccgctggctgatcccgctgagtgcggcgctgggcgcggtgatcgtgctgggtgccgacttgctcagccgtgccgtcgcctttccggtggagacgccggccggtgtggtcaccgcactgatcggcgcaccgttctttctctttcttgccaggcgcaccctatgatccggccacgcgtgcgcctctggctgctgctgggcctgttagtggcggcgacctttgtcagcctcagcgcgggcaccctgtggctcacccccaccaccgtgctggaacgcttgatggcccacgatgccctcgactttgaagtgtggaaccatcgcctgccgcgcagcctgatcgcgatcctcgcggggtgtgcttttggcctggccggggcgattgtgcaaggcgtgatccgcaacccgctggcctcgccggaaattcttggcgtgacccagggcgccgggctggcgctgacggtcgcgatcattggctggccacagatgcccatcgtctggctgccgttggtggcctgcctgggcggtgccggtggcgccttgctgctggcgctgtacaacactggcgtgagtttttccggggtgcggttcgcgctgtccggggtggcgattgcggtgaccttgtccagtgtcaccgagtttttgatcctgtcccatccgctggacatcaacaccgcgttgctcgccctcaccggcagcttgtggagccgcaactggcaccacgtcgtgctggtgttgccgttcctggcgctgatcccgctgggcctgtgcctggccaagccgctgaacctgattgccctcggcgacgaagcggcccacagcctgggcactgcgctgaaccgcacgcgctggcgggcgatggcctgcgcggtgctgctcaccagcctgggcgtgggcgtgatcgggccgatcgggtttatcggcctcgtcgcgccgcatatggcgcggcgactggtcggcgggcatcaccaatatttgctgcctgcggcaatgctgatcggcgcgctgttgctggtgctggccgacacgcttgggcgcacactgatcgcgcccagcgaaatcccggcgggggtcctgacggcggtgattggcgcgccgtattttctttggttgctggcacggttcaagggctgatgacatgagcattctccaggcacatcaactggatatcggctacggcgccacgcgcatcgtgcaaagccttacgtttgcaccaccggcagggaaggtcaccgcgttgatcggccctaacggttgcggcaagtccacgttgctcaaggctttcgcgcgcattctcaagcccacccaaggcgagctgacactggatggccaagcctatgccagcctgtccgcgcggcagttggcgcagcagattgcgtttttgccccaagtgttgccggtgccggaaggcgtcagcgtgcgccagttggttgcctatggccgcagcccgcataactcgctgtgggggcgcctcagtggcaatgatcaaaaccatgtagcgcaggccatgcaacggttggagctggacagcctggccgaccgcgccctggcggatttatccggtggccaacgtcagagcgcctggctggccatggtgttggcgcagaatgcaccgatcgttttactggatgagccgaccacttacctcgatatcagccatcaggttgagctgatggacttgatgggcgagttggccgctgaaggcaagaccgtgatcactgtactccacgatatcaaccaggcctgccggtatgccgaccatctggcggtgatgcacgccggcaagctggtggccgacggcacacccgcagcggtgatcagcgccgagctgatgcgccaggtgtttgaagtgcaagtgcaggtcatgagcgaacctgtgtccggcacgccgatgtgcctcatcgagaaaagcacccgcactcacgcctgacgcagttgcttgaaagtgtgagggtgttactcggaaagattaagtcaggtgcactgtcacttgatcgggtatcagccattaacaaagtggctaattgcaactagcgaaacccgatccataggctgcaagggccatggttcaggggttgcaccggaaatccgggacagcctcaatctattcatttcagtttgtttccccatctcaggaactagatttagaacttcaagtcgattaaccctgctaatgcgctcttcgtgcgtggcgaactaatggcacttctcggtagttccaaatagccatactttctcgcaactagactttaactttatgtcgtcagcccttatcgatgcctgccatatgcagataccgcacacggatcaagtgtgcgcgtggctgatgcagcacgccgggttgaaaaccgttgacctggaacgtgcccggcgcttgtccacagacgccagcgacttgctcggcctgctcagtcggctggggctggtgtctgaagccgagttggcccgcgcctgggccggtttgctcggcgcaccgttgttgctggccgatgccgcgccgccgttgctcgaccccttgcccgcgttgaccgagcggttcatgcgccattaccaggtggtgcccatgggctgggcccagggcggtgtgcgcgtgctcgccgccaacccggcgcagctgtatccattccaggccctggcctacgcgtgccaggccccggtgtggttggccattggcccacgcactgaagtcgagacgctgatcgagcgctactacggccagggccgttccgccatgggcacgctgatcgaaaacctcgacgagcagggcggtgcgctggaggatatcgaacacctcaaggacatggcctccgaagcgccggtgatccgcctggtcaacctgatcctgcaacgcgccgtggaacaacgcgcctcggacattcatatcgaacccttcgaaaaccagctcaaggtgcgctaccgcatcgacggcgtgctgcacgacgccgaggcgccaccggccagttcctcggcggcggtggtctcgcgggtgaagatcatggcgcggctggacattgccgaacgcaggctgccccaggacggacgtatcatgctgcgcatccagggcaaggaactggatttgcgcgtgtccagcgtgcccaccagctttggcgagtcggtggtgatgcgcctgctggaccggcaaaccctgaggttcgatttccagagcctgggcttcgacggccagcgcctggcaagcttcctcgatctgctggagcgcccccacggcatcctgctggtcaccgggcccaccggctccggtaaaaccaccacgctgtacaccgcgctgtcacggctcaataccgccgagcgcaagatcatcaccgtggaagacccggtggaataccagctcgaaggcatcaaccaaattcaggtcaagcccgccatcggcctggactttgccggtgcgctgcgctccatcgtgcgccaggacccggacgtgatcatgattggtgaaatccgcgacctggaaacttgccgcatcgccatccagtcctcccttaccgggcatctggtgctgtcgaccctgcacaccaacagcgccgccgcgagcatcacgcgcctgctggacatgggcgtggagagctacctgattgcctccacggtcagcggcattcttgcgcagcggctggtgcggcgcctggatccggccacacgcgtggcctttgaagcgccgccgcaattgatcgccgagcacgggctggatcgcttgaccgggcaacgcccgattctgctctacagaggtgcttatcacggccgcagcgccatcacggaactgctggtgatgaacgatgaactgcgcaacctgttgatgcgccacgccgacgccgcgacccttgaacacgccgcgcgccgcgccggtttgcgcaccctgtacgaggagggtttgcgccaggcgctggcgggcattacctcactggaagaagtgctgcgtgtgacccggggggagggcgcgtgagcctgttcaagttccgcgcgctggacgccgagggcgctgcgcataacggcacactggaggcggccgacagaacggccgccgttgtcgcgctgcacaagcgcggtctgctgttgttgcagatcgaagcggcgggcagccccttgctgcgacgcgcgcgcgggccattgaagggcgcggcgctggtcagtttcactcaacaactggcgaccttgttgggtgccggccagccacttgagcgttgccttggcgtgttgctcaggcaacccgggcaaccccgggtgcgcgcgctgatcgaacgcatccgtgatcaggtcaaagcaggcaaaccgttatctgccgcgctggcgcaagagggcggcacgttctccccgctgtacctgagcatggtgcgtgccggggaggcgggcggcgcgttggacagcaccttaagccagctcggcgactatctggaacgcagccagttgctgcgcggcgaggtggtcaacgcgctgatctatccggcgttcctgctggtcggcgtattgggttcactggcgttgttgctggcgtacgtggtgccgcagttcgtgccgatattccaggatctgggcgtgccgattccgcttatcaccgaggcggttctggcgctggggcaatttctcggcggctacggcctggcgctgttggccgctctgattgcgctggcaggcctggttgttgcccgcctgcgcgacccgcagcgccgggaaaaataccaccgccacctgctcggcattcgcgtgttcggcccgttgttgcagcgcgtcgaagcggcgcggctgacgcgcacccttggcaccttgctcagcaacggcgtggcgctgttgcctgcgctggtgatcgtccggcaagtctgcagcaattgcgcgttgcaggcgcaagtcgagagggcggcagaggcggtaaaaggcggcggcaccctggccggtgcgttcggtgcccagccgctgctgccggagctggcgttgcaaatgattgaagtcggcgagcaggccggtgcactggacagcctgttgctcaaggtcgccgacgtgttcgacgttgaagccaaacgcggcatcgaccgcttgctcgcggcactggtgccctccctgaccctggtcatggctgtgctggtggcggtgatcatgctcgcgatcatgctgccgctgatgagcctgaccagcacgatatgaaggagaactttcgatgaaaaccctgcgccgccaaggcggtttcaccctgctggaaatgctcgcagtgatcgtgctgctggggattgtcgcgaccattgtggtgcgccaggtcggcggcaatgtggacaagggcaagtacggcgcgggcaaggcccaactggccggtctgagcatgaaaatcgacagctacgccctcgacgtcggctcaccgcccgccaacctgcaacagctgctcgacaagcccggcaacgcgtcaggctggaccgggccgtacgccaaaccctcggacctcaaggaccccttcggccacgcttttggctatcgctttccaggccagcacggtgctttcgatctgatcttctacggccaggacggccagcccggcggtgaaggctacaacgccgacctgggcaattgggaataactacgccatgccccagcgcggcttcaccctcatggaaatgctggtggtcatcctgttgatcggcttcgctgcgggggtgttggggctgggcgtgcgccaggggttgcagctggggcaagagcgtcgggtggtcggcgcgatggttgacgcgctgcgcgccacgcgcgcgggtgccgtcatcggtggcaaggcggcgcgcaccgagtttgacctgcaagggcggacgtttcaggcgccggggcgtgcgcgccagcactggccgcaggcacttcaggtcacggtagaaacggctgaagagcagggcgcggcggtgacgttctatcccgatggcagctccacgggcggcaatctgcgggtggccaacggcaaccggagttggcgcatcgatatcggctggctcaccggcagcgtgcaatccagggcgttgccatgaggcgccaggccggtttcactttgctcgaaatgctcgccgccctggcgttgatggcgctgggctctacggtgctgttggttgcattcgggcagagtgcgcgttcgctggcgcaagtcgcccacagcgaccgcctgacccacgccgcgctgagcgtgctggatcaggaagcgagtggcccgctgacggaaggcatcagccagggcgaactcgatggcatccattggcaactgacgtgcacctctgagctgccgcgcctgtttcgcctcgacctgatcgtcagcgagggcccgcatcaagcccggttcagcaccttgaaggcccgcctgtgaagcgccctcagcagggtttcaccttgctggagatgctcgtggtactgagtttgctcagcgtattgctggtgctggtcagtggcgccttgctgggggccaaccgcgcggtggccaaggcccagcgctacaccgccaacctggatcaaatgcgcgctgcccagcagttcttgcgcacctcgatcagcgaggcgttgccgttgtatgtcgggcatgccgagggctttttcattggcacagcggagcgcctgacgtttgtaacgacctctcccggcgtgctcggcggcgggattcagcaggtcagcgtgcagcgagccgggcaggatctacaggtcggttttgccggtctagaaccccaagtgctgttgagcaatatcgacggtgtgcacttcagttatcgcggccagtcgccgctgggccaggccaccggctggctggatgaatggccgtggcccaagcgtttgcccggcgcggtgcgtatcgcggcgaacgtcaacgggccggtgccgtgggtcacccaggtgattgccctgcgcctgaatctggccagcgcaggtgctgcagaatgaggcgtcaacgcggtgccgcgctgttgctggtgctgtgggtgctggccttgctcagtgtgttgctgggtgggctggccgggtgggtgcaactgcaaagtcgccaggcattgtggctgcgccagcatgcccaaacggtattggctgccgaggcgggtatcgcaacggtcatggcccggcagcgccgggttgccgatggccgcgaaatacccctgagcttcgacgacgctcaagtacaggtcagcctgcgcagcgagcgcggcaagttgtatgtggttaacgccgaggcggatgacttcagccgcctggccctggcctgcggcgccacccgggcccaggccgcgcaattggcagaggctctcgacgcacggcgcaatcagggcctggcgccgtttcgggtgctggaagaagtgcgccagttgcctggtatgactcaggcgctgtaccgccttttactgccggaaatcaccttgtggagcgacctggatcgccccgatccggccttcgccagcccgctgatgcgccaggcgttgcacctgccgcacccccacgccgagggtagcgaccccggtgaaatgctggaaatcgacagccgcgccgagcgccccggtggctaccaggcgcggttgcacgtcacggttttatcaagcccccaggaggacggcgcgcaaccctaccgggtgctgcgttggcacgaatgaatcgactggaacccatcgcccggtattggcgcggcagcctgctgcaacagggctggcgcctgtggctcgcagagttgcgtgcctgtgtgccgagttggctggcattgcaggagccgccggagcacatccatcactggcctttgaaagcgccggttgtgccgggtgcttcacgccaagtgctgatgcttgccccgcaaacggtactgctgcaaaccgtgcaactgcccctggccgcagcgcgcaacctcagtaccgtcgtcggttatgagctggaccgtttcacacccttcgacgccgagcagttgtattttgtcgcgcacctgcaacagcgcacggccgcccatcttgaggtgacgctggtggcgatcctgcgtgaacacctggaccggatcctcgccgactgcgccgccctgggtttgcacccgtatcgtgtggatgccgcaggcctgggtatcgacttgctccccgcccccctgcggccgcgcaaacagccgcgtggcaaaggcctgcagcgcagcctgccttggctgtgcggcgcactgctgatcgctgcgatgctgttgtggctcaacgaccgccagcgtgtggtcgacgccatgcgtgccagcgtcgagcggcaacaaatccaggtcgccgaagtacacgcgttgcgccagcaattgctcaacacccgtggcgcggcgcagtacctcacccggcacaagctcgcccagccaccgttggccgcgctgctcaatgacctcaccacttgcctgcctgccgatacttggctcgaccagttggacgtcaaggacggtgaagtttccctctccgggcaaagtgccaaggccagcggcctgatcacccgtctcaaaggttgccggcgcctggaaaacgctcagttcgaaggggtgattcaacccgatgcccacaccggcaaagacaggtttgccttgcgtgcccacctgcgccaggaggccgcctatgtgccgaccccttacaccccgtgaacgtcgcggcgcggcgttgctgctgctggcggtggtcgcaggcgccgcgtattggctgttggtcgacagctggtttgccgggcccttgcgcaccatgggcgagcaggccgagcaattgcgcgagcagcagcaacgctatgccggcgtgttgcgccagggtgatacgctgcgccgccagcttgcgcaagcgcagcaagacccggccagcagcaccagcctgttgcccggcgatgatcccgacgtggtcgccgccgacctgatgcaacgcctcgccgatttggtcagcagccacgccagcctcggtggcggttgcagcctgacccagcgcaaacccatcaccccggagcaggacagcggcgagccgtatcgtcaggtgcaggtcagcctgacgctcaactgtgccatcgagcctttggaggcgttgctgcatgagctggagtatcagccgccgtttctgttcgtcgatgaactgcgcatccgccgtaatcgagaagccccggcgatgggcggtgcgggaagactgcaggtgcagttgttggtgcgcggctacctgcaacccgagggggcgcgatgatgggtgtattgcgcccgttggagtggggcttgctcggtttgtcgggtttgctcggtgtgttgatggcggtcatcctcagcagcattggcgacgaaccccaatggctgcccgaaccggacgcccatacccaggcttcggcccgcgtgcaggttgcaccgaatgtcccgctggaaaacctcgccgccacctggcaggcaccgctgttcagcccggaccgcagccccgaccgtgaagtggctaatgcccgcgtatcgagcctggccaacctgacgctcagcggcatcatgatcaccggcaacctgcaaatggccctgctcaaacaggccaacggcccggccttgaccgtgcgcctcggccagaccctgcccaacggctggcgcctggagcacctcaccccgcaatccgcccgattcgccctggatggccgcacccaaaccctgaatctgtacgccaagcgtttgccaccgccatcctcccgcccacccgtgactctgccccgcgagcctctcccttgatcgacctgcgcacctccctgttttgcctggccactgccgtctctttggggggctgtggttccatccccgaccgtctcgatgcggacgacgatctgctccacgaagccctgcaaggtacaggctcgcagcgcccgccgaccgaagcgcctgcgcccgacaacccccagcccgaagcccacgttgtgccgcaacgccagttgatccgtggcaaccaacagttcgtgcgcccgcccgcggctcccgcgcaggcgaaggaggaggggggcgacatcgtgttcaactttgccgaccagccgatcgaggcggtgatcaacagcgtgatgggtgacctgctgcacgaaaactacagcatcgcccagggcgtgaaaggcaacgtgagcttttccacctccaggccggtggataaacaacaggcgctgtcgatcctcgaaaccctgttgtcctggaccgacaacgcgatgatccgccagggccaacgctatgtgatcctgcccgcagaccaggccgtggcgggcaagctggtgccgcagatgaacgcggccgcaccctccagcgggctttcggcgcggctgttcccgttgcgttttatctccgccaccgagatgcaaaaactgctcaagccgttcgctcgggagaatgcgtttttgctggtcgacccgtcgcgtaacgtcttgagcctggcgggcacaccggatgagctggccaactatcaggacaccatcgacaccttcgatgtggattggctcaagggcatgtcggtgggcgtgttcggcctgcaacgcgcgtcggtggccgagctgatgcctgagttgcaagcgatgttcggcacggacagcggcagccccttggcgggcatgctgcggtttttaccgatcgaacggactaattcggtggtggcgatttcttcgcaaccgcagtacctcagcgaagtgggcgactggattcgcaccatcgacgaaggcggtggcaacgagccacagatgtacgtttacgacgtgcgcaatatgaaggcggcggaccttgccaagtacctgcggcagatctacggcacaggcgcgatcaaggacgacccgccggcgaaggtcgcgccggggctgcgcacggcgaccctgtcctcgcccaacaacagtgtgcagaaccctgcgcctcttgctgacgagccggagccggaaagcaccgagatggcgccaagcgccagcctcgaagcgggcacccgtattactgcgcagaaaagcagcaaccaactgctggtgcgtacccggccggcccagtggaaagagatcgaggccgcgatcaaacgcctcgacaatccgccgctgcaggtgcagatcgagacgcgcattcttgaggtcaagctcagtggcgaactggaccttggggtgcagtggtacctggggcgtctggcgggtaattccaccagcaccacagtggccaacgcctccggcagccagggcgcactgggcggtggcggggcggggttgggggccacggatgcgctgttttattcgtttgtcagttccaacctgcaagtggcgttgcatgcattggaaaagaacgggcgtacccaggtgttgtcggcgccgtcgctggtggtgatgaacaaccagccggcgcagattcaggtgggggacaacattccgatcagccagaccacggtcaataccgggacctcggataccacactcagcagcgttgagtatgtgcagaccggggtgatcctggatgtggtgccgcgcatcaatccgggggggctggtgtatatggatattcagcagcaggtcagtgatgcggagcgtcaaagtggtgatgctgatacgccggtgaatccgcgtatctcgacgcgttcggtgtcgacgcaggtggcggtgcagagtgggcagacggtgttgcttggggggttgatcaagcaggacaacgctgagggggttagttcggtgccgtatttggggaggattccgggattgcggtggttgtttgggagtaccagcaagtccagggaacggacggagttgattgtgttgattacgccgcgggtggtcaccagcagcgggcaggcgcggcaggtgacggatgattatcgggagcagatgcggcttttgaggtctggggagtgagtgggttggggtggggtacatatccgttatttgagtgaaggctgagattggttccgcccttacggcgggtcactttgcaaaagcggcaaagtaaccaaaacgctcttgccccaacactcggcacctcgctcacgctcggtgtgcccgtaatccgacagggatttggggggccgccgccacgcgccatccctggcgcgtcgcggctaaaccggcgtcctgccggtttaccccccaaatccctgtcgaattccggccagcgtgttttaacggggcgcctcagatcaagatcaaaagcacggcggcctgacagccggcctgagtggtgtgaagcaaaggcggtcttgtgtgggagctggcttgcctgcgatggcatctactcgatgtgcctggaagaccgaggtgtctgcatcgcaggcaagccagctcccacagaaaagcaagtctgtggaggtattgaagtttgactcggtcaaaaaatgtgggagcgggcttgctcgcgaaagcggtgggtcagtcaacatttttgtaattgagagaccgctttcgcgagcaagcccgctcccacagttgagtctccatttgtctggaggactgcaatctgctctagcaaaaacagcgcttttgatccaaccactcaggccggctgtcaggccgccgtgcttgtgatctgcttttgattttgatcctgggcgccccgttaaaccacgctggccgaacgcaggcttgaatccgtgggtaacccggcaggacgccgggttagccgcgatgggccagggatggcccatggcggcggcccacggatttaagccggagtgcgggcacaccgagcgtgagcgaggtgccgagtggtggggcaagagccttttggttacttttggctgggccggcaatccggctcttttcaaaagtgacccgccgtaagggcggaacccatatcagccatcacccaaataccggatatgcccgcccgacaatctcaaaaagacattacacatatgaataacataatcaaaaaataatgaattcaaagaatattagcttatgcccaaatagcattatatttttaaaaaccattccgttatgtttgatcgcaacagcctacccctgacctcggatggtacccagcgtgattcagattctgcgcgccatgaccgggtaaagaccctgcggcagaatcgttggaagggagttcaacgtatgttgccaattcaaaccccgcactcgctccacacctagttccagaccgccgatacctctgaaaaaaccgagcaccgcgcccgaccgcgcgacggcccgacttcgcgatctggaatgtttggagtggctatgaagcaagtcttgcaacccaccgctgccctggcgctggccctgttggccaacaccgcccaggcccaggacgacagcaccctgtccaccgtagtggtcaccggcaaccgtggcgctgaacagcgcaccgtcaccagtagcccggtgccgattgatgtagtcagcgccaagcaactgcaaagcaccggcaagcccggactgatggaagccctgagcgccgtcatcccctcgctgaccctgccggaaaaaaccggttgggacaccagcggcatcgcccgggcacccaacttgcgcggcctgagtgctgccgaagtgctggtattggtcaacggcaagcgccgccacaccagcgccaccctgaatatcaatggcatcaacaccggcgcggcgccggctgacctcgacctgattccgatcagcgccatcgaccacgttgaagtcctgcgcgacggcgctgccgcccaatatggttccgatgcgattgccggggtgatcaacgtgatcctcaaggccgacaccagcggcacgtcggtgaccaacgtcggccaaggctacgacggcaagaaacagaccgtgcagcaaagcctcaacaaaggtttcgaaatcggcaacggcggcatcgtgcaactggccctggatgcccgcagccagaacgatgacaacaaggccagcgccaacggctacagctatgcacaagcctttgatcaggcaggccgtgcgacctatggcggctacggcacccccaagaccaacctgctgacattgggctacaacgccgagctgccggtcgatgacagcttcagcctgtactccttcaccacctattcacggcgcaaggccgagcaggggcagaatttccgcctgccgaccatcaccaacaccatcaccaccgggccaaacggttacccggccggttacacgccgacctggtacatcgacgaggacgatttccaggccgcgttcggtggcaaaggcaccgtcggcgagtgggactgggacctttccaccacctacgggcgcaacgaggcggagcagggcaccacccacaaccagaacccgtctttgggcgaatacacgccgaacagcttcacctccggcacctggatttccaccgagctgaccaccaacctcgacttcaagcgcggcttcgacatcggcctgcaaaagccgctggacctgagctacggcttcgaacatcggcgtgacacctatgaggtgcaggccggtgattacgcgtcctatgccaacggcggctactgcgtggcgccgggcaattgcgcgtcgtccggggcccaggtcaccaacggcatttcgccggacgaagaaagcagcgcctcgcgcaacagcctcgccagttatgtcgatgtgggcttcaacccgctgccggattggtatgtgggcagcgcgtttcgctatgagcattacaacgaaggcgtgggcgccacccgcagcggcaagctgaccacccgctacgacttcaccccgcaattcgccgtgcgcgccaccgtcagcaatggctttcgcgcgccgtcgttggccaacagcctgttcagtgcgcgctccaccacctatggcgtggtggacggggtctatcagtcgatcaactacggcgtgctgccggtgagttcggcggcggccaaggcccttggcgcacaggatttgaaacccgagcgctcaaccaacttcagcctcggtttcaccctcacacccaccgaccgcctgaacttcacggccgatgcctacgtgatcaacctgcgcgaccgcatcacgctgaccggcaccttgcttggccctgaaatcacccaggtgttgcagaacagcggcatcaactccacctccggcggccagtactttctcaacggtgccgacacccgcaccaaaggcgtggacctggtcagcaactacacccaggacctcggccggttcggctcgctgaagtggacggccgcgttcaactggaaccagaccaaaatcctcagttacaaggactcaaccaccatcctgggcacctcgtatgagctgatggaccgtcaggcccgaggcttgatcaccgatgtacaacccaagaccaagctgatcctgggcggcgactggagcatcgaccgtttcaacctcaacctggccctgacgcgctacggcgcttacaaagaggtcaacgtctccgccgaccgcagtctggaccgtctctacagcgccaaatggatcaccgacctcgaccttggctacaacctcaccaaagacctcaacatcgccatcggcgccaagaatctgttcgaccagtaccccaagaaacaaggtgtgccgagcagcaccatggttgccagctacggcacttattcgccctacggttttaccggcgggtactactacacccgcttgacctatgccttctaaggcggaggaataacacatgcccattgtcgccaaatcctatgacctgattgaagacgtcagcccggtccgccaggcccgcgtttcaacgccgatcaaagccctgcaagtggtgcccgcgcggcatccgtggcgctgggccgggtcgatctttgccgcgctggtgctgctggccatcgcccattcactggccaccaacccgcgttgggagtggggcgtgtttggccagtggtttttctcgccttcggtactgcgcggcctcggccagacgctgttgctgacgctgctcagcacggtattcagcgccattctcggcaccgggctggcgctggcgcggttatcgggttcaccgttgctgtcggcattggcctggggctatatctggtttttccgttcgatgccggcgctgctggtgctgatcatcctctacaactttgcctacctgtatgaccacatcgtgctcggcgtaccgttcacctcggtggtattcgccgaatggtcgacggtggacgtgctcagccagttcaccgtggcggtgttgggcttgagcctgatgcaggcggcctatgcggcggagatcattcgcggcggcctgatcggtgtggatgcgggccagcacgaagctgcggcggcgctgggtttgccggcgtcacgacggatcttccgcatcatcctgccccaggcattgcgctcgattctgccttcgggtttcaacgaaatcattggcctggtcaagggcacgtccatcgtctacgtgctggccttgcccgagctgttctacaccgtgcaggtcatctacaaccgtacccaggcggtgatcccgctgttgatcgttgcaacggtctggtacctgatcatcaccagcgtgctgaccagtgcccagtactacgtcgagcgccacttcgcccggggcaccgcgcgcgtgctgccaccgacgccactgcaacgcgtgcaccgctggctcaaggagaaatcccatgagtgaagcccgcgccggccgtatccagattcagggcgtgggcaagcgctttggcaaccagcaggtgttgaaagacatcgacctgaccatcgcgccgggtgaggtcacggtgattctcgggccttccggctcgggtaaatccaccttgctgcgcaccatcaatcacctggagaagatcgacagcggccatatcaccatcgacggtgaatacgtcggctaccggcgcaagggcgacctgctctacgagctcaaggagcgcgagattctcaagcgtcgtatcgacgtgggttttgtgttccagaacttcaacctgttcccgcacctcaccgcctgggaaaacatcgccgaagcgccgctggcccacaagcgctggagcaaggcccaggcacaaggcaaagcggctgaactgctggccaaggtcggcctggcggacaaggtcgatgcttacccgcgccaactctccggtggccagcaacagcgcgtcgccattgcccgcgcgttggcgctggacccaaaagtgctgctgttcgatgaacccacctcagcccttgacccggagctggtgggcgaagtcctcgacgtgatcaagggcctgacccaactgggtgtgaccctggtgatcgtcacccacgagatcggttttgcccgcgaagtggccgaccacgtggtgtttctctgcgacggccaactgatcgaagaaggcccgcccgaacagattttccgccaaccccgacatccccgcaccgtggcctttctcggcaaggtgctttagttcaaggagtgactgccatgtttatctctgctgcccgcgcaaccctgctgacgcttgccgtcagcgccgcacaaacggcgtttgccgtgcaaacggtggacctcagccccgaccgcccgcgcattcatgcaccgcgcaatgacgcggccatcgcgcagatcccgccgggcttcaagttcgcccagcccggcaagttcaccgtggccgtgtccggcgtggccgggccaccgctggcgctgctggccaacgacgacaagaccaccataggtagcgaagccgacaccgcgcagctggtggctgatagtttgggcctgcaactcaacgtggtgcagaccagctgggaagactggccgctgggcgtcagctcgggcaaatacgacgcggtgatcagcaacgtcacggtgaccgaagcgcgcaagaagcgtttcgacttcgccacctaccgccaggatgtgctggggttttatgtgaaaaccaccagcaagatcaccgagatcaaacaggcctcggacatcgccgggctgaagatcatcgtcggctccggcaccaaccaggaaaaagtcctgctggcctggaacgaggcgaatgaaaaagccgggatcaaacccgcgctgttgcagtacttcgatgaccaggctgccgggcaactggcggtgcagtccggtcgcagcgatgcactgttcgggcccaactcggtgtacgcctattccgccgcgatcactggcggcatcaagctcgtcggcacggtgaacggtggctggccattgaaggcggatattgccgtgaccacgcgcaaggacaacggcctgattcagcccatccacaccgcgctggaaggcgcgattgccggcggccaatacgagcaggtgttgcaacgctggggcctggctatcgaacgggtcgacacgtcgctgatcaacccaccgggcctgccggattaaggagtcgcgagcatgggactgacacgacgtgaagcgctgtcgagcatcgccgccgtcggcggtgagaaggccgccaaggatgcgctggcggcattggggttggggccgtcgtcgcatcgccggccacaacccttgaaactcaaggacggcctggggcagggcacccgcgtgctggtgctgggcgccgggattgccgggctggtcactgcgttggaactgacccgcgcggggttcgcggtgcaagtactggaagcccgcgaccgcgtgggcgggcgcacctggaccctgcgccatggcgaccgtgtgaactacaaggacgggcgcacgcaaaccgtggcgttcgatcagggcctgtatttcaacgcaggcccggcaaggatcccgagccagcaccgtacgcttcttgattattgcagtgagctgggcgtgccattggaggtcttggtcaacagcagccatggcgctcaggtgcggccggacttgcagcaaccggcgttcaccgtcggccaggcggtcaatgatacgcgcgggcacctgtccggcttgcttgccaaggcagtgcagcgtgatgcccttgatgatgtattgagcagcgaagagcgcacgcgtttgctggcgtttttgcaggtgtatggtgacctgtcccaggcgctggcatttgagggcagcctgcggtccggtcacctggaatcgcccgcccatccgggcgcattgccgcccagcgcccgcccgatcggtctggagcgcctgctgcatcctgagttgtggggcgcgctgctacacaccgaatttccggagttttccgcgaccatgtttcaaccggtcggcggcatggaccgcatcaccgacgcgttctatgggcgcgtgcgtgatcacgtacaactcggcgcccaggtccggcagatccgccagttggaggatggcgtggccgtgacctaccacgacaaacacagcggccgtgaacaggtggtgcgtgccgattacctgatatccacgctgccattgccactgctggccaaactcgacaccgacttcagcgacccgatcaaggccgcgctgcgcagcacgcgcagtgaccatgcgaccaaagtggcctggcagtcgccgcgcttctgggaaaccgattaccgcacctatggcggcctgtcctggatcgaacacccggcccgcctgctgtggtacccgagtaatgatttgaatacccgcaacggcctgctggtggcgggttacgtgaccggcgagggcgccgacgtgtttggcgcgcagccgtttgaacagcagtacgccacgtcgaaagaggcggtagaactgctgcacccgggctattcgaaacacctgcgcaacccgctggcagtgtcctgggaacagatcccctacagcgaaggcccgtggctgcaacgcgaacacttcccggccgatgccagtgccttgctcgaagcgggccatggccgcgtgtacttcgccggtgacggcctggtgcaaagcggtgtcggcatctggcaggaatcggcggcgaactcggcgcgccatgtggtcgggcaactggccgagcgcgtgactcaacagcgacatcttgcggccctggccgcctcttaaggagcaccaacatgagcgacagcattcaacgcaccagcgtcggcgattttccgatctcgcagaccgtcaccgtcccggcctccgccagtttggtatttgtcagcggtaccttgcccgatcttcacgacgcaaacgccccggcgggcacacctgcggcgtatggcaataccgaagtgcagacggtgtcggtgttcaacaagttgcgcaagatcctccggcagcaggacctggacctgggcgacatcgtgcagttgcgcgtgtttctggttggtgccgaagagaccggcggcaagctggatttcgccggattgcaggcggggtacacgcagttttttggtacgccgcagcaaccgaataaaccggcccgcacggcgttgcaggttgtcgcattgccattgcccggcgcgttgatagaagtcgaagccgtagccgccaggacggcgtgatcaactaacgcgcggtatcgagctttgcctgggtggccttgtcgatgaggtgccgcagtgtttcgaacaggggctctgcatcggtgtgtttcttgccgtaggctaggttgaacgcgtagtcgaaatcgggcgggttgagcccctgggtgtgttgcagcagcgtctcaagtttgtccatggccttgacggccttggcttccggggacgctgcgtgttcgtagtcatcccacagcgccagaatctcgtctcgcagggggctgtccagtgagcgggccaggagcagcaaatcgtcgcgctcctgctcgcctttgttgggaaatgctgcctggctgacggccgggatgtcgccgtggatagcttcgcccaagtcatggatgacacacatcttgaggattttcagcacgtcgagcccctggagctcatcggcaaacaccattgccatcaggcacaggcgccagctgtgttcagctgtgctttcggtgcggccggatgcggtgtgggcgcttctgagcacgtccttgagtttttctgcctcgcgcagaaagtcgaggcgacccttgattgtttcaatgtccatgcgcttgcccacgtcttaaaggatgaagcctaggtgcctgggtgctattcgtccacgcataaagtattcgcagacgggtgtcagagcgtctcgaccagacgcgcggcgctaccgtcgctcaagaccaggcgcgtccagcggcacaggctggggtgtatgggcacaaggctggaggcgttgctgccggtcataaactccagcgccgctggcgcctgggtttcgcgccagccggtggtttcgagggcggcctcgacctgcacaatttcgggcgttgcgaagtgccacagcgactgccccatcaattcgcccagcggcctgctgaattgcgcggcgcgggaaggcgaacacgccagcaggcgatgggtcaggtcgcacaccagatgcaccgggcgagtgctttccccgaccagccgggccagcgcctgatcggcagccgcctcgaggcgcgcggccaacaaccgctcaagctggtgctgcgcgtccgggtccatagccagtgcgccgctctcccagcgtgaaatggtcgattgggtcaccttgaacaactgcgcggcatggctttgcttgacgcggtgcagcgcccgccaacgccgcagggcaatgcctggcaaggcgggcttgagcaatggcgggggcatttggacctccgtagtggggcggctgggttgtcagtgtgatgggggtctctctattcctgcaattgcaacgcctgttgcttgagcctgcgtttctgctcaaacggcagtttttcatcatccccgtacggcgcgctgtaccagttgccatagctcgggttgggcagcaggaaccagcgctgcccgaaccacttcacgtagggttcggccgccttgcgctgggccgccagggtgttgtgttcagcctgcacaaaatcccccagcgagtccccggccatcaacaacacgcgcgcatggctggcgacccactggcggcggcaatttttgccgtacccggcgctctcgcaatggccggtgggcgtgctggcggcgagcacctgctcatcgttttccaccgggaaaccacgcaggcgcaagttggcgaccgtggctgccacctggctgtgttcacggttggtcaggtaataaaccttgatgccttttttctgtgcagcctgcaggaatgccaccgcacccgggagtgcctgggccttggcctgatcgacccaagtgttccagcggtcgtaggagtagacctgattattgaggatgtcccgcgcgttaagcggcacgttgtccagcaacgtttcatcgatatccaccaccacggcgggcggcaaccccttcaggtctcgcgcaggaaagggcagtgcatcccagcccgggtcggcgagggccacgtcgagttggcgagtggcgttggcgaacaactggcgatagatcagctcatgttcgatggacgtctgggtccaaagcacagcatcgagttggtcattggctggcgggtgttgctggcagccaaccagtaccgtggccagcaggcagacgctggtgaagaacaggttacgcatgggcaggtctctgaaggggatgggcagcacagtactgcattcaccggcgctttacaggcatcaggtcctgatcaatcgcccagtgcggctgaccgggttgcaggcacacaccgccaacccagcgttcctggctggcaaaatccagccagttggcggcgccgctttcaaccttttgccccaacgctgtcaatgccagcacgcgcttgggccaatccagatgaacgtcggactcggtcagtagtggctgctcgccatcaatcaacggccgcaacaacgcgtgaaacatcatatcccccagaaacggcagcggctcgcgcttggccatcaactcggcgaacactcggccgaagggcaccaggccggcttcggcgatgtagctcaaagacaggcgttcggtgagtgacaagccgtcccgaatgcctggcaactcctgcaactggcgcagcagcgccggcgccagaaagggcagggccgggtgagtctcatgggccagttccgccagcctgaccggcgagctgtcgcaatacgccgaccacgcctgacgggcgagttgcaccgcgccgtcatcaatcacgcggcgttgtggccataaccacgccaatacatcgggtgcgagctggccaatgccgataaaacgttcgacgccgggaatacggtcgacctcgatcagctcaagttttttcggcgcgtgctcaaggcccgccagcacgcggatcaggaacagttggtcataggcatccgcctcgcaccacaacacgctgtgttcggcactggcgagttcgccaagctgatcgtattcatcggtaatccggtgtgccgcatcgcttggggccatggcaaacgcctggctgataaaagcactgcgcagggcgcgaaactcctcggtgggcaggtcacgaaccggccccatgcacagcgggtcggtgagcatccggaaccggcctttgaacccggccacttgcaggctgtgggcgatgtcattgccacagcgccagtgcgtggtacgcgcttcgtcgctggcgtggaagccggggtggcgggcggcaaagtcaatagcgtcgacgtgcgccttgagcttgggccaactgctgaaacccagctgcctggcgacctgccattgggcctgggacagcgtggcgcccgggtcctggcgtttgaggtgcggcaacagttccttggcgcgcttgcgctgctgctcaaggttcagacggccgttggtgttggaggcgaaagggcgctgcgacatacgatctccttgcacaaaccttgtccgctttaaggttgggagtcgtagaaatgggagatttcagtcaagatcctgggcgcagccctttccgcggaaggtggcgtagaaagcgccaggcacgaaatataggcagtggggtggttgtttgcaagccgttcaaccgagtaatgaattcatgaccgaaacaccgttaatcgagacccggggcctcacacgagaggacgagcgccgtcaggtacttttgctccaaccgacgaacttcaccctcaaccgtgccgaccgcgtgtcgatcaccgggtcttccggctccggcaaaagcgtattcctgcgcgcgctggcgttgctcgacgcgcctacgggcggccagatcctgtggaacagccagccgattgccaacgcacagattccccactaccgcagccacatcagctacctgtcccaacgcccggcgctgattgagggctcggtggaggccaacctgcgcttcccgttcagcctcaagaccctgcgcacgcgccgcttcgacccgcaggcggtcatcacgctgttggggcatgccggcaagtccccggacttcctggcgaaaaacgctggcgacctgtcgggcggcgagtcccaggtggtctcgctgattcggaccctgcaactgaaccccgaggtgctgctgctggacgaacctaccgccgcgcttgatcccgcgtcttcgcgcgaggttgaaacgctgattgatgcctggttcgccgccgatactgcccgcgcctgtatctgggtgtcccacgacctcgaccaggcccgccgcatgagcgacatccacttgcagatgagtgccggtgtactgagcggagcggcccggccatgaactatcaaaacctgaccgcgctggacatgggcatcgccgcgtcgctgatcctgatcaatggcgcgttgtcgttgctgctgcgcctgggcctggagcggcagttgctgtgggcggcggtgcgcacagtggtgcagttgctggcgattggttacctgctcggctgggtatttgaattcgcctattggtacgtggtgctgccgctgatgtgcgcgatgaccttgattgccggcttgtcggcggccgggcgcgggcaacgcacgtacagggggcagcgcgccgatagcatcctgtcggtgtggggcagttcgtggctggtgacggcggtgggcctgtttgcggtgatccgtatccacccgtggtacgagccgcagtatgcgattccgattctcggcatgatcctcggcaataccctgaccggcgtgtccctgggcattgaacgcatgacccaggaactgacctcgggccgcaacaccatcgagatgatcctcgccctgggcggctcgcgctgggaagccgcccaggaagcgattcgccaagcggtgcgcgccggcatgatcccgacactgaaccagatgactgtggtcggcatcgtcagcctgcccggcatgatgaccggccaggtactggcaggggagagcccggtggatgcggtgcgttatcagatcgtgatcatgttcctgatcgccgcgtcgtcggcgctgggcacggtcggcgcagtgctgctcacctaccggcggctgttttcggccagccaccggtttttgcgtgaccggctggaagagcgctgacgctcccaaaacacgggcgatcaaaatgtgggagctggcttgcctgcgaagacggcggcactgtcgatacaggtgcagcctgactcaccgttatcgcaggcaagccagcctccacaagggttcagcgcacaggttttaaggctggtccggcaccccaaaatccagcaccactttcatcgcttgagtcttgtcggcggccaattcgaacgcctgcaccgcctgctcaaacggtacggtatgagaaatcaccgggcgcacatcgatcacgcggcgattgagcaagtccactgcctgggcaaactccgcatggaagcggaaggtgccgcgcaaatcgatctcgcggctcaccagcaggttcaacggcagcgatacatcaccgcccaaccccaccgtcaccagcacgccgcgcggcgcgatgcattccaggccgttgcgcagggcctgggcgctgccggagacttcgaacatcacatcaaagtagcctttctcggcggtgtagcgtttgagcgcgtcagcaccgtcggcgatgttatgggtgcgcgtggcgcccattttttccgcgcaggcgagggcgctggcggacaagtccaccgcaacgatttcacccgccccggctgcgcgcaggctgccgatcagcaaattgccgatggggccgcaaccggtcaccagcacgcgcttgacgaagacagcgccggcgcgctgaatcgcgtgcagacccaccgacaagggttcggctaatgcgccttcagcgaggctgactgtgtcggccagccgatgcgcttgatgggtctcgatcaccaggctttggcgaaacgcgccctggatatgcggaaagggcatcgcgctgccgtaaaagcgcatgttcaggcaatggttcggcaaaccctgatggcaataccggcaaccgccgcaggggcgcgacggcgacaccgcaatacgctggccgaccttgaacaagccggtgtcagtgcccaaggcatcgatcaccgccgacacttcatggccgagcaccatcggctcgcgcaggcgtacggtgccgaagccgccgtgctggtagtaatgcagatccgaaccgcagataccgccccgggcgatgcgtacgcgcagttggtcgggggcgagggtttgcggctcatcctgcggatcgacccgcaggtccttcgaggcatggcagacaatggcgtgcataaggttctccagggttacagcgacgcggtgataccaccgtcgacgtacagaatatgaccgttaacgaagctcgctgcatcgctggcaagaaacaccgctgcgcctgccagctcctcgacgtcaccccagcgccggctcggggtgcgctgcaccagccagtcgctgaattcagggttggccaccaggttggcgttgagttcagtcttgaagtagccggggccgatgccgttaatggtcaggccgtgcgggccccagtcaatggccatgcccttggtcagcatcttcagcgcgcccttgctcgcggcatatggcgcaatgcccgggcggcccaactcactttgcaccgagcagatattgatgatgcgcccccgcttgcgcgggatcatcgcccgtgccacggcctggccgaccaaaaaggcgctgtccaggttggtgctgatcaactcgcgccagtgctgctcgctgtagtcttccagcgggccgcggcgttgcatgccggcgttgttgacgaggatttccagcgggccgaggcgttcttcgatatcggccacggcggcctgaatcgccgcgctgtcggtcacatcaaacgcttgggtatgcacctgcaaaccttgcgccgccagcagcgccgccgcgtcacgcaaggtgctgcggttgcgcccgttgagcaccacccgcgcaccggcctgggccagcccgcgggcaatcgccaggccgatgccggcgctggaaccggtgaccagcgcgagtcggccatcgaggcggaagttgtctaaaacgcttttcatgggttacctctcctaacgcttcacaccaccaacgacagcagcatgatgaaccccagggcggcgaaggagagcacggtctccatcagcgtccaggtcttgaaagtttcgacgacggtcatgttgaaatactgcttcaccagccagaagccggcgtcgttgacgtgcgacagcaccagcgaaccggcgcccgtggcgagcaccaacagctcacggttgaccccgggcatcaggccgatcaccggcgcaacaatcccggcgccggtaatggtcgccaccgtggcggagcctgtggccacgcgaatcaccgccgccaccagccacgccagcaggatcggcgaagtctcggcgcgcaccgccatatgcccgatcacatcaccgacgccgctggccaccagcatctgtttgaaaccaccgccggcaccgacgatcaacacaatcgcggccgtcggcgcgaggctcgaatccagcagcttgctcagttgttcccgcgaaaagccccgcgccgcgccaaaggtatagaacgccagcagcaaggctgcgagcagggcagtgatcgggtggccgataaagtccatccacacgcggaacgtgctgtcggcagcaaaggccacgtcggcaaaggtcttgagcaacatcagcacaaccggcaacagaatggtgatgaccgtgatgccaaagcccggcagattgtcgcccgaagactccttggcgagttgctccatcagttcgtccgacgctttgccgggtacgtagcgtgaaatcaggttgccgaacagtgggccggcgatcaccgccgtgggcaggccgacaatcagcccgtagaaaatggtcttgccgatatcggcgccgaaaataccaatggccaaaagcggccccggatgtggcggtaccaacccgtgcaccaccgacaaaccggccagcagcggcatgccgactttgatcagtgacagcccggtgcgccgcgcgacgataaacaccagcggaatcagcaacacgaagccgatttcaaaaaatagcggaatccccaccaggaacgctgaaaacatcattgcccagtgcacacgctgtttgccgaaggcgcgaatcaacgtgcgggcgatctgatcggcaccaccggaatcggccatcaacttgccgagcatggtgcccaggccgaggatgatgccgacgaaccccaagacaccgccaaagccgtcctggaatgacttcatcaccttgtccaccggcatgccggacgtcaggccgagaaagcctgcggccacggtcagcgcaacaaaagggtggaccttgaggtgggtgatcaacaatatcaatccgataatcgtgaccagcgcgtccagcagtagatacgtgtcgttagccatgccgagcatggtgcctccttgttctcattgttataggccaagccctgtcatatcgtgtatgacggggtgttacttcaccccaggcgcgggtcagcgtccaattttcatttgtgatcgggtgatcaatgtttgtgataagcggagaggcttgatggagctcaagcacttgcgcgcctttgtggtgctggcccaggagctgcatttcggccgggcggcggcgcagctgtccatcgtgcagccggcgctgagcatgcagatcaagctgctcgaaagcggcctgggcgtgcgcctgctcgaccgcaaccgccactcggtgacgttgaccgaggcgggtcgcgcgttcctgcccgaggctcaggccaccttgcatcaggcggcccgtgcggccgacgcggcgcgagcgtcaaaccgcggtgaaatcggccgcgtgcgcctgggcttcgtatcctcggtgctgcctcaactcttgccgcaattgattcgcgccgtgcaccagcgctacccgcgtatcgagctggagcttaaggacatgcccggccctgaccaggcggccgcattgaaaaacggcttgctggatttcggcctgatgcgcctgcccgctgcccaccccggcgtgcagacgcgcgccgtgttgcgcgaaagcttctgcgtggcgctgccgatggagcacccgttggcggcccggcaatcgatccagcccgccgatttgctcgacgtgccggtgtacatcctggcgcgccgttacgcgccgggtttctatgatgagttcatgcaggcggtggcggttaccctggacatcgcctcggaactgggcgagttcaccaccatgctcgcgctggtgtccgccggcttgggcgttggcgtgttgccccagcaggcggcgcgggcgctgccggccaattgcgtgtcgcggcatctggagctgggggcgttccaggcgtccaccggcctggcctggaccgaactggacagtgccgtgaaaaccacgctgttcaacctgatcgttgaattgttcggcgagtgattgtttcatccggtgaaatactggattgtgatttctgatgattccatcggtcaggatagcggtggaacatgcagggcgtcgatcccctcacttttggagcctttcatgtcccagcctgcgatcaaacactacggttttccactgtccggccactcccaccgggtcgggttgatgctgtccctgttgggcttgcccagcgaattcatcctggtcgacctcaagcagggttcccacaaagcccctgagttcatggcttcgatcaacagcttcggccaggtgccggccattgacgacaacggcaccgtgctggcggattccaacgcgattctggtctaccttgccaatacctatggcaaaggccagtggttgccgagcgacccggccgggcaagcgcgcgtgcagcgctggctgtcggcggccgcgggtcagttgcacgccggcccggccgccgcgcgcctggccacagtgtttggtgctgacgtcgacaccgtcgccgccatcagccgttcccacgcattgctgcaattggtggaacaacaactgggccacagccgctttctggccagcgaacaaccgagcatcgccgatgtggccttctacacctacgtgtcacacgcaccggaaggcaatgtgtcgctggccgattacccgaacgtgcgcgcctggctcgccagcattgaggcactgccgggctttgtcggcatgccgcgcacggcggttggcttgcaggcaccgtaactttcaagaggagcgccgatggaccgatttcatgaaatgcaggtgttcctggcggtggccgaggaggagggcttcgccgctgccgcgcgccgcctgaaaacctcgccgccgagcgtgacccgggccatcgcggccatggagcaacgcatcggcacccagttgttggcacgcaccacgcgcagcctgcacctgactgaagccggccaacgctatctggaagattgccggcgcatcctggctgagctggatgaggccgaggaagcggcggcgggcagttattcaattccgtgcggccacctcacggtgaccgcgccggtactgtttggcgagctgtatgtggcaccggtactgggggactacctggaccgttttcccctggtgagcatcaacgccttgctggtggaccgtgtggtgaacatgaccgacgaaggtgtcgacatcgccgtgcgcattggtcatttgcaggaacccgggcagcaagcgatcaaggtgggggaggtgcgccgggtggtctgcgcatcgcccggctatcttgacctgcacgggcggccccggcatccgtcgcaattgcgcgaggctaaaattgccacgtcgtcctccagccagttggtcagcgaatggcagttcgttgacggcggccagccgctgacggtgcccatcgagccgcgtctggtggtcacggccaacaatgcctccattaacctcgctcgcctgggctggggcatgacgcgggtgttgtcttatcaaattgccgcatcggtggcggcaggtgagctggaaatcgtgctggaagattttgagccggcaccgttgcccatccaggtggtgttccagaaaagcagccgtgtgccggccaaggtcaacaccttcgtggacttcctcacccaccgcctgggtcaggatgccgccctgaacccggccatgaagcggcgcggctgatggagcgctatcgcgacatgcagctgttcgccacattggccgagcacccgagcctggcgtcggcggcccgcagcgccgacgtgtccggcccgaccctggtgcgcgccatcgcccgtctggaagcgcgtttgcgcgtcacgttgttgcaacgcagcacgcggggtgtgagcctcaccgaagccggcagcgcgtatctggccgattgcacgcggctgctggcggcggtggacgccgccgaagcgtcggccaaaggcttgcacgtgcaggcccagggcaatctgcgggtgtttttgccgttcctgttcagtcgttatgtgatggcacccgtattggccgattacatggagcgctatgggcaggtgaatctggtcgcgcactaccacgactattacccgaacctgcacgaggaggggctggacgtagcgatcctcgtcggtgaactgcccggttcttcgttgatcgcccgcactgtcgggcaggtacgccatatcctctgtgccagcccggcctacctcgccgcccatggcgagcctcgccacccggatgacctcaaacggcaccgcctgatcgccagcgccgatcaagtccactgggattttcagggctacccgctcaaggcccgcgcacgcttgagttgcgccacggtgcaaggcgcaatcaacgcggcggtacacggtgccgggctgattcgttgccagagctacccggttcacgagcacctgctcagcggcgacctgctgcgcgtattgccgggccatgaattgccgccgatgccggtgcacgtggtctaccgcgaaggccgtaatgcgccgatgcgcgtgcgcagctttgtcgaccactgtgtggcggcgctgcgtgaacatccggcatttcagttggtgtaatggtggattgcctggcgtggtgattctctcttcgtcgggtgcggagcagcatgaacacagtccatttgaggtgctcgccatgaaccctaccgaacaatccccctggcatgccggcgaactacgcatgcaggaaagcgcgggcgccgccgaacgcatggctgtgatcgggcccaaggtcattcgtgatcatttgccggaacagcaccgggatttctacccgttgttgccctatctgatgctgggcgtggtggatgagcagggcattccctgggcgaccctgatcgaaggcgcgccggggtttgcacattcgccggacccgcagacgttgcaggtcgacagcctgccctccagaagtgacccggcgtatgccgcgatggctcaaggcgcgtcggtcggcctgctcggcatcgaccttagtacccgccgccgcaaccgcatgaacgggcgtgtcgcagcgctggaccgcgaggagttttcggtggacgtggtgcacacctatggcaactgccccaagtacatccaactgcggccagtcgattcaatcgcacgcaaacccggcaccgtggttgaacgtttcgacggcctggacgatgcggcaaccatgatgatccgcacggccgacacgttcttcgtcgccagctatgtcgaggttgatgggcagcgctcggtggacgtctcccaccggggcggcaacaccggcttcgtgcgggtggacggcaatgtgctgaccattcccgacttcgccggcaacctgtttttcaacaccctcggcaacctgcaggtcaacccggtggcgggcttgctgttcatcgactttgaatcgggggatgtgctgcagctgtccgggcgcacgtcgctgatcctggacgggcccgaagtggccaggttcgaaggcgcacagcggttgtggacggtgacggtggaccaggtcacccgccgccccgccgcgttggcgctgcgttggcagttcgccgggttttcacctcacagcctggcgatggggcgttggcaggacattccgtgaggatcaacggtgggagctggcttgcctgcgataacagtggccctgctgaaaaagaggtcgcctgacccaccgccttcgcagcctcgctgaagctcgacagctctcacaggggtggggggtgtttgcgaaaatcctcggtaatcatatcagcgccgcgccgtcaccaccggcgcatccgcccacgccccacccagcgcggtatacaggttcacttcagccaccaactgcgctagccgatccacgatcagcgcctgctgtgcactgaacagcgagcgctgggcatcgagaaacgtcaggttgctgtccaccccgctgcggtagcggttttgtgccaggttgtaataagtctggttggcggcgacgaaatcgcgctgtgcctccagctggtcgttgaaggtctgccgggcggcgaggccgtcggcgacttcctggaacgcggtctggatcgatttctcgtactgggccacggtgatgtctttttgcagcttggcgtaatcgaggctcgcgcgcaggctgccggcgttgaagatcggcaggttgatctgcggctggaaggtccaggtgcccgagccgcctttgaataatcccgatagctctttgctggtgctgccggcgttggccgtcagggtgactgacggaaagaacgcagcgcgtgcggcgccgatgttcgcgttggcggcctgcagctggtattcggcctgcaggatatccgggcgccgctgcagcagatccgacggcaaccctgccggcacacgcgccaccaggtcatcggccagtgggcgcgccggcaggtgttcattaaccggggcgccgaccagcagcgcgaggttgttgaggtcctgggccacctggcgttcatagcgagccacgctggcgcgggtgctttcgaccgccgtgcgggcttgcaccacgtccagcgccgaggccttgcccgcattcttgctgcggctggtcagttgccagctgtggtcgttggccaccagggtttgctgggccagcgccagcagttcctggtcggcgcgccaggtcaggtaagcattggcgacgttggccaccaggctcagttgcgcgctgcgccgtgcttcttcagtgcccaggtaggtgagcatcgcctgttcgctgaggctgcgcacgcggccgaaaaaatccagctcgtaggcgctcaggccaagggtcgcggagtagttcgaggtgatcgcagacttgccggtgcccgtcacatcgccaggcactttctgacgcttgcccaggccggtggcagacaccgccgggaacaggtccgcgcgctggatgcggtactgcgcctggaaggcttccacattcaacgccgccacccgcaaatcgcggttgttgagcagcgcatcgccgatcaactgctgcaaggccgggtcatgaaacagcaattgccagtccggttttactgccactgttgcagcttgtgcctgggtgtagacaccattttgtgggtactgcgccggcaccggtgccgccgggcgctggtagtccgggatcagcgaacagccgcccagcatccaggccaggccagcggtggtgattatccgtgtcttcatcaagcgccaaccatccatttggccaagccatgccggccactcacgcccagcttggcggcggcgcgtttgaggtaagtttcgatcgaactgtttttcacgctgagtttttccgccatctgcggcacggtgccgcctgtcaacagcccgaggcagacttcctgctcccgcgccgataaagtcacctcgctcagcgacaggcgcttgtagaactcgcgctgcaattgcgactgttccaacaggctgtgggtcggctcggcctcggtatgcggcgcctggcgcaggagctgcgcgtggcgctccatcagcggcagcagggtgtccgacaggcatttgagaaacgacagttcagccagggaaaacccgcgctgtgtaggcgggcggtagaacgaaatcacacaacggcggttgccctggcgcgacaccaggttgcattggtgcgaggtgccaagcgggtgtgcgctgttggccttggctttcatctggatcaacagcgggtcctgcatgcgcagcatttcgcgcagcagcgggtgatctttgagagggtgcagggtttgcggcgctgacaaatcctttttcaggccggcgctgcccagcagcttgatgtcgcgcacgctgtcgcgcagttcatcgagggtccattcactgaggtcgaccaagtgaaccggcacccatttgtccaccaggtgcaacatggtggcagcgaaattttcctggccgctgctggaaatcagctcgcccatttcggcgtaaaagtgtgggctgtgtgtgtcggtaatgctgcgggtcagactcatagccatctcatccttgatgtcgaaaaccgtcgacgggcgccctgggtctgtgtggggcggtccgtgttccttgagcgtaactgtcgttgaacgtagctcggcgttcgagatttcatttagccatagagatttgtcctacgtatgtagcggaaacgagggacacaagctgccataaaattcgcgccattaattcgacgtttctgacgatgcatttcgcctacgaaattcgaatcatgaagtttatagttaattaactaattgatattaaacaataaaaattgtcagacagaaattctgtcctacgcagacatcggccagatatagccaatctcctacagccctttaatcgtttcagcactgaaccatcagccaaccccgttttggcccgtgcgaatgtccgggtttcgggtgacagacagccccggacccccatgctcaaatccgccaatttcggcgtattgggcctccctgcgcggccagtgcctgacccatgagaaggatcttatgaagcaactcttaagcccgacggccagcttccccctcaccgccgcccaacaggacatctggctggaccaactgcgcgtgggtgaatcgccgctgtacaacattggcggctatgtcgactttgcaggccccgtagtgcctgcgttgatccagcgcgccgtcgagttgctggtggccaagcacgacgcgttgcgcacccggttgcacaccgacacgcagggtttgccacgccagagtttcgccgccacgctggccgccgacgtggcgctgcacgatttttcccgcttgcccgatccgcaggcagcaacccaggccctgatgcaagcgcaaatggcccggccctacgccatgaccggcgagccgctgtttcgcttttttctggtcaaactcgacgacgaccattaccgcctcggcacccaggcccatcacctcatccttgatggctggggctttggccagatgctgcaatccctggcgcggctgtacaccgcgctggaacaggggcgcgaacccgagccgctggcgccgtcctatgtcgactttatcgataccgaccagcgctaccatcaatccccgcgttatgcccgggaccgggcttattggctggacaagtatcaggtgctgcccgagccgctgctctcgccgcggcataacgcccaggcgtcgagcaacactctggtggagccgtttccagtggcgctgctcaaccgcatggagcaggtcgccaaccgttatcaggcctcggcatttcatgtgttgctggccgcgatgtatgtgaacttcacgcgcacccaccagcgcgatgagtgggtcgtagggctgccgattctcaaccgttccaatgcgcagttccgctccaccgtgggtttgtttacgcaagtgagtgcggtgcgttttcagttcagcgaggcgttgccgttcagtgcagtagtgcgtggcgtgcgcgaccagctcaagcaggattttcgccaccagcgtttccccttgagcgagatgaaccgcgagctgggtttgcgtcgcacggatcgcggccaattgttcgatctgtcggtgtccttcgagcaggacgaccacgacctgcgttacggcagcgtccaggcgcgggcggtcaaggtgtccaactaccacgagcccctgccgattgccatccacctgcgcagcaaccgctaccaggacacggcgtgcctgcattgcgtatacaacgaggcttatttcagccacgacgaggtgcaagcactggcgcaacgcttcacctggctgctggagcaggggctggaaaacaccgcgttggcagtggctgatttttccctggtcacacctgccgagcaggcgcgtttgcagcaatggaatgccaccgcgcaacccacggctgaaccgcaaaccctgcacgggcgtatcgaagcacaggctgcgcgcaccccggatgcgattgcggcggtgtatcagggccggcacctgacctacgttgtgctcgatcaacacgccaacgcgctggcccatcaattgctgagccatggtgtgcagccggatgaccgcgtggcgatcctcgcccggcgcggactggataccctgacggggctgttggcgattctcaagtccggcgcctgttatgtgcccatcgacccggcccatcccgccgagcgcttgaattacctgctgcaagacagtgcccccgtggcggtgctgacccagcctgacctgctgcatcggctgcctgtttttcaagtgcccgtgctgttgctcgacgcaccgggtactcacttcggtgccagcccgcaggtggcggtcaaaccgtcaaacttggcctacgtgatctacacctccggctccaccgggttgcccaagggtgtgatggtcgaacaccacaccgtgtcgaacctggtggactggcattgccgggccttcgacctgcacgcgggcagccacaccgccagcgtggccgggttcgggtttgacgcgatggcctgggaagtctggccggcgctgtgcgtgggtgcgacgctgcatttgccaccggcgcaggacgacgcgcaggacatcgacgcactgctgagctggtggcaaacgcagccactggacgtgtgcttcctgcccacacccgtggccgagtacgccttcagccagcgcctggagcatccgaccctgcgtaccttgttgatcggcggtgaccgcctgcgcgcgttcaaccgcgcgcagacctttgatgtgatcaacaactacgggcccactgaagccacagtggttgcgacctcggggcgggtcgacgtcggccagcctctgcatatcggtgcccccatcgccaatgcctgcgtgtacctgctggatgaaaagcagcgcccggtgccgctcggcgcagcgggggagttgtatgtgggcggcaaaggcgtcgcacgcggctatttgaaccgcccggaactgagcgcggagcgtttcctcgacgacccgttcacccgcgggcgcatgtaccgcactggcgacctcgcacgctggctgcccgacggcaccctggagtacctgggccgcaatgacgatcaggtgaaaatccgtggcgtgcgcatcgaactgggggagatcgaatcggcgctggccacgcacccagcggtcaaggaagccgtggtgcagtatcgtgacgggcagttgctcgcctggtttatcgagcatcacccggtcgaaatcgaaacactgcgcacccatctgcaagcccggttggcggactacatgctgccagccgcctacgtgaaactggaggcctttgcgctcaccgccaatggcaagcttgaccgcaaggccttgcctgcaccaaccaaggcggcctttgtcacgcgcgcgtttgaggtgccgcgcgacggcgtggaaaccacgctggcgcaaatctgggccgagttgctgcaggtgcagcaaatcgggcggcacgatcatttcttcgagctgggcgggcactcgctgctggccgtgcaactggtgcaacgcatgcgccatgccgggttgcgtgccgatgtgcaggtgctgttcggccagccgacgctggccgcattggccgcggcctgtgtgggcggcgaagtgaacgtgccggccaaccggatcccggcgggttgccgccagatcaccccggacctgctcgcactggccgagctggatcaagccagcctcgatcgcatccttgccagcattcccggtggcgcggccaacgtgcaggaaatttacccgctggcgccgttgcaggagggtttgctctaccaccacgtcaccgacgagcgcgacccgtaccagcaacaggcactgttcagttttgcccggcgcgagcagctcgacgcgtttgcccaggccttgcaacaggtgatcaaccgtcacgatatcctgcgcaccagcctggtgtgggacgccctcgagcagccgatgcaagtggtgtggcgcgaggcgcagttgccgcttgcgccgctgagtgagccggcgcaaccactggatctgcgccaggcgccgctgatggccctggactacgcagaagagctgcacaacgagcgctggatcgccaggttgcgctttcaccacctagtcaacgacgctacctcggtgaggttgctggccgatgaaatccgcgcgcacctgctcgggcaacaggccgaacttccaacgccggtgccttaccgcaacgtggtggcgcacagccgtgcgccggcgctgcaggccgcgcatgaggcgttctttcgtgagcggctggcggatgtcgacgaaccgaccctggcgttcggcgtgcaggcgcaccaagttgaccgcgctgaaatcgaagccttcgaacagccgctgaccgagcacctgaaccaacgcttgcgcgcgcaggcgcgtgcccttggggtcagtgccgcgagcctgtttcacctggcgtgggcgcaggtgctcgggcgtgtggcgggccgtgacgacgtggtgttcggcaccgtgctgctgggccgtttgcaggccggcgagggcgccgaccgtgccttgggcatgttcatcaacaccttgccgctacgggtgcgcttggccgggcaaagcgtggtcgcggcactgcatgacacccacacccggctcagcgccttgctcgtgcatgagcaggcgtccctggcgctggcccagcggtgcagcagcgcgtcgccgttgttcaacagcctgctcaactaccgccacggcgccgccgacagggcgttgaacctggtgccgggcatcgacctgctcagcagtgaagacgtcctcagttacccgttgatggtctcggtggacgatgtagcgagcggctttcacgtgcaggtgatcgcgccgcgccaggtcggtgccgagcgcctgtcgggttacctcagtaccgtgctggacgggctggtggacgcgctggaacacacgcccgcaaagccgttgcgcgagatccaggtactgcccgccagcgaattgcgcgcgcaactggttgacttcaacgccaccgaaaccgacgacccgcagacgctcacgctgcaagcgctgtttgaagctcacgcgcggcacatcccccatgccatcgccgtgcaggccggcacgctgcaactgacgtaccgcgagcttaacgagcgcgccaaccggctcgcctaccacctgcgcgagcgtggggtgcagcccgactctcgagtggccttgtgcgtcgagcgcgggctggacctggtggtgggcttgctggcgattctcaaggctggcggcgcgtatgtgccgctggacccgggcttcccgcgtgaacgcctggcctacatgctccgcgacagccagccggtggcgttgctggtccatgccgccacccgcgaggtggcgggcgaggtatcgattccggtcattgacttcgaccactgcgcctggagccaggcgcccagcggcaacccgttggtgccaggcttgagcgccacccacctggcctacgtgatgtatacctctggctccacggggactccaaaaggcgtgatggtcgagcaccgcggcctgtgcaacctgatgcactgggcctcccggctgtgcccgaatgccgaagggggcgcgttgctgcaacgcgcgccgttcagcttcgacggttcggtgtgggaactgttctggccgctggccaacggcatgcgcctggtcctggcgcgccccgacggccatcgtgaaccggcgtacctggcgcaggtaatccgcgagcagcagatcacggtgatccagtttgtgccggcgatgttgcagcagttcctcgaacttgacgaggcggccctgtgcaccagcctcacggatgtgttgtgtggcggcggtgaactcaccgaagccctggcccgaggcgtacaggcgcgtttgccgaacgtgcgtttgcacaacgtttacggccccaccgaagccacggttgacagctgcacctggacgctggagcccggcgcgccggtgcctgccgtgcagttgccgattggccgggcgatcagcaatacgcgcctgtacgtattggacgcgcacgacatgccggtgccgatgggcgtcagcggtcagttgcatatcggcggcgtcggtgtggcccggggttacctggggctcgcgcagatgacggccgagcggtttatcgacagcccgttcgtggcgggtgaccggttgtatcgcacgggcgacctggtgcgttacctgcccgatggcaacctggagtttctggggcgcaatgactttcaggtcaagctgcgtggcgtgcgcctggaactgggcgaaatcgaggcacggctggcggcgcatccggcgttgcgtgaagtcgcggtgtctgttcgtgacgagcgtttggtcgcctatttcactctgcgtgagccggcgccgacgccacaggcgctgcgtgcccacctgttggcacacttgccggagtacatggtgccggccgccttcgtgccgctcgacgtgatgccgctcaaccctgccggcaagctcgaccgcaaggcgctgcctgcacctgggctggaggcggtagtcagccgcgcgtatgaagcgcctcagggcgagccggaaatcttgatggcgggcatctgggcgcaggtgctgaaactggagcgggtagggcgccatgaccatttctttgagttgggcgggcactccctgctggcggtcagcctggtggcgcagatgcgcaaggccgggctggaggtggatgtgcgggcgctgttcagtcatccgacgttggcgcagctggcgggcagggtggtgacgcctgtgcagcaggtggacgtgccgcaagccgccatcccccaactcggccgccgccgccggatctagctgtcggtatggggtcactgtgggagccgggcttgcccgcgatggcggtggatcaggcagcgcagctgtgtctgagctaccgctatcgcaggcaagccagctcccacattttttaccgcgttcaggcagcggtttgggtggggttcaggcattcgatggagcggtcgacggtggttttggcgatttccagcaggtgccatacggccaggatttttgcttgttcggggggtggcagccgttcgccgcagtccagtgctgtggcggaggcgctgttgagcaggctggcggtgtagagcagggcgtcttcgaagctgaggtctgcgttgatgctgtggaagccttgggtgggcaggtagtggtcgatggcgcggttgaaggcggcgcggtctttggcggggtcgcagggtgggtcggggacgactttattcatggtgaaaatcctgtctgatcaaggagacaccactcttcgcgactaacgaaggtggcggctgtacgcaggttagtcgaccggtcagaacaggaacccggcgcgcccgaagacgccctgcgcacagccaccattgagcttcatgggagcatgcgcctgttctgaatccgggcgactaaacccgatcactgatgagcagtgacggaccgcagactagccaccggttccagcaggcacaaggcggcagggattgtctaggaaacgtcctgcaattaaaagcgacggggcttgctggccttttacaaaccgtgaccaagtgccaccacgggggtggtgtacatatccgttattgaggtaacggcggctattggttccgctcttacagcgggtcacttttggaaaagccggaatgccggcccaggccaaaagtaaccaaaaacgcttcgccccaccactcggcacctcgcttaggctcggtgtgcccgcacacaggcttgaatccgtgggccgccgccatgggccatccctggcccatcgcggctaacccggcgtcctgccgggttgcccacggattcaagcctgcgtgcggccagcgtggtttaacggggcgcctgagatcaagatcaagatcaaaagcaagagcacggcggcctgacagccggcctgagtggttgaatcaaaggcgcttttttcagggcagattgcgttcccccagacaaatggagatctgaactgtaaggagatccaaatgtgggagctggcttgcctgcgatgcgtacgcctcggtctttcggttatacccagttaaccgcccagcctgcgcaacaacggcagcacctctgcccccacatgtatcgcttcctccaaatggggaaagcctgacaggataaagctgtccacccccaactggtggtactcctcgatccgctccgccacccgcgcgtaactgccgaccagcgccgtgcccgcaccaccgcgtaccaggccgacaccggcccacaggttggcggacacttccagttcccgcgcgccgcggccgcggccttgcatgagttgggtctggcggctttggccgacggattcgtaggcggccatttggcgttgggccttgtcgatggcgtctttggggatttcttcgagcaggcgctccacatgggcccaggcggcgtcgtcggtgggggcggcgaagatgtgcaggcgcaggccgaagcgcagggtgcggttttgcgcggcggcgaggtcgcgcatgcgttggatgcgttcggcgatcattgccggtggttcgcaccacatcaggtaggtttgcccgtgggcggcgccgacgcgttcggcggcttcggaagcgccgccgaagtaaatcgacggcacttcagcccccggtgcaatgggtgtggtgacgccgctgcgatagaaacggcccgggtgcgctggcggttgcccggcccacacggcctggaagacctggaggaattcggcggtgcgcgcgtagcgctcgtcgtgttcgagaaaatcacccagcgagcgttgttcaaagcggctggagccggtcaccacgtgcagggccaggcggttttcgctgagcagttgcaaggtcgcggcgcggtgggcggtgtaggcgggcagttcggtgccggggcgcagggtcagcaggaatttgaggcggcgcacctcctgggccagcacggcggtgatcagccacgggtcttcaaagccgctggcagtgggcaccatgatgccgtcgaagcccgcctgttcggtggcgcgcacgatctggcgcaggtagtccagggtcggcgcgcgttcgccttgctggaacaacccgaccttgggcaagccgctgctggtgaggtggcggccgtcgccattggtgggcaaaaaccagtccagctgcaggggcgggcgtacctcagtgttcatgttgcgggcgctccttgcgcaaaagggggatgacctgctcaccgaatcgcagcacgtcgctgacggccgggccgccttccacaatcacctggctcaggcccagcccgtgcagttcctgcaggcgggtggcgacctgttgcggggtgcccaccagaatcagcggctgcccggggtgcagttgcagcaggttggggtgcacttcccattggcgcaacgggtggcgggcgcggggcagggtggcgaggcgttcgtctggcagctgtggcacgggcaatacagcggcggcggtttcccaggcgaggtcttcgctgtcgccgaggaccaggccgaaggtgcaggcaaacgccaggtttggctggatgtgccgccagcgctgtatctctttggccagccactgcgcagggcccggtgtgagcaggcaggtttgggcatgggccgccaccagcgtgtggctttggctgtcgtccagtacaagcgtgggtgcgggcaattcgcggcgggcgacgccggcgttttccagttggaaatacaggccctgataatcgaggccgccgccctgcggtgcgagcagttgctgaaggatttccaggtattcgccgatgcgttcgctgcgctggtcgcggttgagccattcgccaaaggcgctgcgttcactgttgggcacgtgcagctgcacgcggtggccgctgatcgattgcaggctttgcagggtggtcgccagcgctgccggcagcatcacttccggcggcacgctgaccgacagttgcacccgccgcgtgtgtgcgcacagtgccgctgccacgcccaggctgtcggcgcacaacgcgccgccgggaatccacaggccgtcgagcccggcgtattccaccgcctgggccagctgaatccattgccccggccgcgccgcccagtcgggtgtacacagaggcatcagccaactgaagtgaaggggcatgcacgcactccgtagttcatgatttttccccgccttttttccagacttttttccagcccagggccggggcaatgtcccgggcgatgatttccagacgcttgaggatctgctcctgggtcgagctttcggcctggaccacggcgatcacgtaatcagcataaggcagcaaggacggatcttgctgcaagcttttgatcacttcatcgggatggccatggtgcacgttcatcaggcgcaggtgttcctgcaaatccacggcttcatcgatcaagccttcgcgttgcaggcgcgggatatgccgctcgatgtccaccgccagctccgcctgggcactggcgcggtcggcggcggggaagatggcgcgcaccacgccgatacggggtgcgcgttcggcatgcgaccaggcgtgcaggtaggcatcggccagcggtttttgcacggtcagcgggtcgtgggtggcggtgccaagcagcaggccattgccttggcgggcggtgtaggcggcgccgtcgaggctgccgtgggagtgccacacccgtgaagccaggccgggcgcaggcggttgcaaggtcagttcagcgctcaggggtttgccttccagcaggtgctgcacgcgctgttggcgctcggcgaaatccgcctggcgttggctcgggtcgcgatcaaacgcactgaaattgtcgaggttggcgccgccgctgcccaagcccagttgcacccggccaccactcaaggcatccagcacactggcgtcttcggccaggcgaatcgggtcttcaaacggcagcacgatcacgccggtgcccaactcaatgcgctgcgtgcgttcggccactgccgccagcagcaccagcggtgagggcaggcggccaaagccgttgctcagatggtgctgggcaatccagccgccatcgaagcccagcgcctcggcgacttcaaattgttcgatcaggtcgcggtagacctgctgcgggtcatcgccaaaggcgtggctcagaaagcccagtttgaagctcatgacagggctcctgtcgtcagggtcggttgccagccgagggccggtgcgatgtgttcgcggataacttccaggttgcggatggcctcgcgcagcggcgtgctggtggtctgcacttgcaggatcaactggtcgtgggcgcccagcgtcgggccgtgttgcaactgctcgacaatctgttccaccgggccgtgcagtacgccgaggcgcttgagggtgctgtcgaagtcgtcgtctatcgcgcccttgaacacgccgatgctttgctggcgctgaacataggcgaggatgtcgcggcgcgtggcgtcgtcgggtgacggcaacagcgcctgcacccgtgcgacccgtgcgggcgtgccattgtcgcccgtccaggcgttgcggtaacggctgacccgttccacaccggccgctgcgggctggtgcgggtcgggcgccatgatcaaaccgtggccgcgctcggccaccaattccactcgggacgtggcttcccacagccgctgattcaggccattggcgcgtggcagcaggcgtgagccgctgtcggtcagcggcgcattccccagggcgttgagcacctgttgcaagtgctgctcgtagtcgcggtggcgcgcctcatggtcgcggccaaacgccaggaacgtctctgggtcaaaccccgcgccgaggcccagttccaggcgaccattgctgagcaagtccagcaccgccgcatcttccgccaggcgcagcggcgtttcctggggcaatacgatgatgccggtaccgaggctgatatgccgcgtgcgctgggcaatcgccgccagtaacaccagcggtgacggcaagcggccgtgctcactggcaaagtggtgctgcgccacccagccactgtcgaagcccagttcctctgcgaccttgaacagttcaagcgtgtcgcgatacaccttggggtcgaagcccgggctgtatacccggctcaggaaccccagggaaaagcctgcactcatggtttgcctccggcccgttggctgaagcggttggccgggcgcggcaggccgaggttttcacgcaaggtggcgccttcgtattcatggcggaacagcccgcgcgcctgcaacaacggaatcacgcggtcgacaaacaggtcgatggcgccgggaaagtagggaaagaacacattgaagccatcgcaggcgcgcgcctggaaccacgcctcgaagtgatccgccacgtcctcagccgtgccgatcaccgggttgccacctgccaggcgcaggtacagctggcggatgctcaggttctcggtgcgtgccagctccagcaccttgtcgcggcggctgccgcgctggcccaccggtgtttccggcaacgggccgtcgaggtcatgacctgacaggtcgatgtcgtcgccaagggtatcggccagcaagcgcaggcctagcaccgggtcgatcagggcctggaattcttcgaagagtgcctgggcctgttcgcgggtgtcggcgataaaaggcgtgacgccgggcaggatcttgacgtggtccgggtcgcggccaaacgcctcggcgcgggtcttgatgtcctgataaaaaccttgggcaccttccaggctgtgtgagtgggcaaagatcaattcggccacgcgggcagccaggtttttgcctggctccgacgcgccggcctgtaccagcaccgggtggccctggggcgggcgcgcgacgttcagcgggccgcgcaccgagaaatgctcgccgcgatggttgagggtgtgcaatttggccacgtcgaagtattcgccgctggccttgttgcggatgaaggcgtcgtcgtcccagctgtcccacaagcccttgaccacatcatgaaactcttcggcgcgttggtaacggtcgccgtggtccacgtggtgttcgcggccgaaattccaggcctcgtcggacactacggaagtcaccagattccacgcggcccggcctttggacaggtgatcgagggacgcgaatttgcgcgcgatatggtacggctcgttgtaggtggtggtggctgtggcgatcaggccgatgtggcgggtgacagcggcaagcgccgacatcaaggtcagcggctcgaagtgctcggcgcgggccgtacggctcagcgcgtcgtgatgatgcccccacagtgcgaccacgtcggcgataaacagcgcatcgaatttgccgcgctcggcggtctgggcgatgtgtttgaaatggtcaaaatccaggctggcatctgcctgggccagggggtggcgccaggcagcgacatggtgaccgctgttggccagaaacgcccccagcttgagttgatcggtgcggcgggtcatgaacaggctcccatcggagtcagccacggggcctttgggcaggccccgtgagccgggttagaagttgtacgtcacgccggtgtaccagtagccgccggtggtgccgtaaggcgagaagttgccgtaagggaaggcgcccgagctgctggccaggccggtgcgttccgggtacttgttgaacaagttgttggcgccggcattcagggtgacggccttggtcaggtggaagtcgacgttcaggtcggtgatccacgccggcgaaaaggtgcggtcgtagatctcggcggtgccgtactgggtgtattcgccgtagcgggtcaggttgagcgccacttcgaacctgtcgtaggtccaggtggtgcccagcagcagtttggattgcggcaggccgtacttgaggttgccctggcgctgacggtcgtagccgccgtccgggccgagcgcctgggtggcgacggaggaggcgtggatcgagtcgatctgggtggtgttccagttaaagcccgccgagtatttcaggctgccatatgcaccgatgtcctggcgataatcgccgaccaggtccacgccacgggtggtggtgtccagagcgttggtgaagtaggtgaccgcctggttcgggttaagcccggccgcagccaggatcgcgctgatctgcggggtgccgccgaggtagccggtctgggcgatgcggtccttgattgcgatctggtaggcatcgagggtgatgttggtggcctcggtgggttgcagggtgaagccaaggctgaagttggtggatttttccggcttgaggttgctcgcgccgagggccttggccacgtcggagtccactgccacgttgcggtagtcaaacagctggccgttgacgctggtttgcgaggtcgaactgtagatctgctgggccagcgacggcgcgcgaaagccggtgctgaaggtaccgcgcacggccaggatcggggtcagttggtagcgggtggagaacttgccgttggtggtggtgccggagccgtcgttgtaatgctcatagcgaccggccaggtcgacgtgccatttgtcggtgaagtcctgcccgacctcgccgtaaccggccaggctgatgcggcttttttcggcggcgtcggccggcgtggtgccggcgccggaaatagtccccggtggaatgatcgctccgttagcccccgtgttgaaaggcccgctggcataggaggcgaggtcgcccttgccgatcttgtagtcctcgtaacgctgttccaggccccaggaaatctgcgtcggtttgtacaggcccaggtcaaaggcgcgggtcaggtcgaggttgttggtccactggctgaaggttttcacgccggtgtccaccgaggtcggcgaggtcgggccgtagctcaggttgtaggtgtcggtgagggtggcgcgggcgtggtcctggccgtaggtgctggacaggtcatagtcccagccggccgcctggcccttgccgccgaacgcaacctggaagtcgtcttcgataaagcgcaggttgtcttcgatgccttgcgggtacggcgtctgaatgccgttgaagctcggcggctggtggaaggccaggggtttttccgagttgcggtgggtgaaggtcgaaaacgagtagagggtcagggcgtcgtccaccggcagttcggcgttgtagcccaggctgaagtttttcgcctcgggcaggccggtgccgtaataggtgtggcgctgggtggtatagccgctggagtcggtgtagggcgcgtcgtcggagcggtcggagacgttctgtttcttcacgtccagcgcgaggttgatgaagccgtcgttaggcagggccaggccgacgttgccggtttggcgcacggtttcgccgtcgccgttttcatagttctggccgtagctggtcgacaggctgccgccgtggtctgtctgcttgagcacgatgttgaccacgccgccgatggcatccgagccgtattgcgccgaggcgccgtcgcgcagcacttcgacgtgatccaccagggcggtggggatcatgtccaggtccaccggttgcgagccggagttgaggtaggtgccgttgttcagcagcgcgctgttgtggcggcgcttgccattgaccagcaccagcacctggtcgccgttcaaaccccgcaggctgatggggcgcaccaccgaggtagagccgaaacccgaagaggcgggttgattgagcgacggcagcactttgctcagggcacgggtcaggtcaccttgcccggtggccagcaactgcttggaagaaatcacgtccaccggtgcggggctctcggccagggtgcgcgcctgcccacgattgccgatcaccaccacggtgtccagcgggttgtcgctggccggggcgtcggcggcgagggtcaggctgctgtagctcgcggcctcgcacagggccacaaataacagggtgtgggcgaaggccttgccgggtcggccggcggcggtacgtgatgcattcatgatgggaaacactccagtggttgtaggcgttgggcctgatcgagggcggcttgttgggtgcaagctctggtgaaaggctggagagcaagggctgtgccatctgtaaaaagtgtttataaacagatggttagtgcgagtcggtgaggggtgttggtgcttttctagcaggccgcagggcaggctgttgatttttacgcaggggatttgcagacgcagcgagtggcgagccgcgtggtcgggccggggcggcttggcacaccccttgctctccccacgccatacctgaacccaaggaagttttatctgtatgcccagacccggcccacgcaacgccctcaccgatatcccaggcctcacggtcggccacgccacggacctgcacgtcgacaccggcgtcacggtgatccgccccgatggtttctggaccgccagcatcgacattcgcggcggcggccccggcgggcgcgaaaccgccgccctcgaaccggaaaacatggtgggccagttgcacgcgctggtgttcagcggcggctcggtgttcggcctcggcgcggcggatgccgtggcggccaagttgtctcaggacgaagtggggttgcatttgaaacccggtgccccggcgattcccatcgtgcctgccgccgtgctgcatgatctggccaatggcggcgacaaggcttgggggttggagccgccgtatcgacgtttgggttttgaggcattggccaatgccggcgaagcctttgcgctgggctcggtcggcgctggccgtggggccatggcgggggtgttgaaaggtggattgggcacggcgtcgctggacctgggcgacgggttgatcgtggccgcgctggtggtcgccaacccgattggctcggtgtacatgcctgacggtaaaaccttctgggcgtggccgtgggaggtcgcgggggagtttggcgggcatcggccggtggacgtcatggattgcagtgacccgatgccggaactgtcgcgcctggattccatgggccgtttgcaggccggggcgaataccacgctggtggtggttgccagcaccgcacggctgaccgtggcggagtgcaagcgcgtggcgatcatggcccaggacggcattgcccgcgccgtgcggccggcgcatttgccgtttgatggggacacggtgtttgccctggcgtcggcggcggtggcattgaccgacgggccgaggcggcaggtggagatcggccggattggctcggcggcggccgattgtgtggcgcgggcgattgcccgaggggtgtttgccgctagaggcgtctgagccagactcggtcaaactgtgggagctggcttgcctgcgatagcaacctgtcagttaacagagatgtagctgacccaccgctatcgcaggcaagccagctcccacagttggatgggtgtgtgtcaggtgaagcgtgacacccgctcttgcgctttcgccgcctgctccggcaaccccagcgcctcatacaccttcaccaggctgcggtttgtcggcacgtcccagccgtcataccggcgccgcaactcgagtgtctgctgcgcgccaaaccagtcgccggcgtgcaaccgcgcatccagttccacctgcgcaaacaggtcacgctgggcgtggctgccgccgatctcgttcagtcgcggcagggcgattgccagttgttccagtgcctgctgccagtcaccgcgcgcatgggccagcaaccccttggccagcggcaaggtcacctcgccccacacgggcctcgcctcaaagctgtgcctgcgtagcgctgccagcaattgatccgcctccggctctcccgcccgcgccaacccatacagatattgcacgctgagaaacggctgcaccgtgtcgcccacccggcgttgcaggtacggcgccaaggcctgccagcgcttgcccacgtcaatcccggccagttccaggcgcgccagtaaagacaccgcgcccacctggtcctgggagtattccggcaagatgccccacacatgctgatcgtaaatctccagtacccgctgatcctcaccgcgcgccaggtagaacagcgccaggtgccaccagttgtgggtgtacatgaacgagttcaaaccggcccagtggtgcaccacgctttccagcaacgcggtgccttcctcgatacgcccctgggtcaacatcacatgggccaacgcgtgttgggcccacggctcggacggttgcaggcgcagggcttgcagtgcgctggcttcggcctcctcgatcaggtggcattgctcgtaggcaaaggccagcaggccatggctatgggcgacatccggcgcgcccgccactgccttcaggccgatgcgcagcagcgccggccagttgccccggttgaattccaggtactggttgagcttggcggcgaacaggtcgcgggggtatcgctccagcacgagttcgctcaggtgcagcacgtgatcgaggtcatcgcgcacccaggcttccagcaacgccaggtacagctgggcgcgcgggtgttcggtgttgaccgcagcggcgcgctggcgatagtgcgcggccagcgtggggccttcgggggactcgataaacatcagcagcagcccggcgaaggcgttggccagcgcggactcggggtcggcatcagcggcggcgagaataccctcggcgcggggctgatagccgaggaagccgccgatgaaatcgtcgaggccctggcgggtggcggggtcttgggtgtcgatggggttgcccaggtaatccagtgacatggtggagaggctcatctattcggatgccgttacaggggcaaaccttgtgccagctgacaccctgcaatccctgtgggagctggcttgcctgcgatagcggcctgccagttaacaaagatgtggctgacccaccgctatcgcaggcaagccagctcccacatttgagctgcggggctgttgctttttgcacagtcgcgcaggccgctgtggttttttcatcacctcatccgcgtgcagcctcaacattcaccggctgaacccccatggcacagcccttgcaaaatccctcgcctaccgttcaagccgaggaggctccatgcgctcattctctttccgccgtgccctctcgtctgtggggctgtgcaccgtcttgctggccggccaggcccaggcacaaccccgtgacggcggggtactgaacctggtcgcccaaccggagccaccgtcgctgatgcacggggtggtcagccacgtgtccacccaatacgtcagcggcaagatcctccagggcctgttgaccttcgacaccgacctcaaacccaaaccggtattggccaaggcctggaccatttccccggacggcctgacttacaccttcgacctgcaggacggcgtgcactggcacgacggcccggcgttcaccgccgaggacgtggtgttcagcttccagaccttctaccccgaggtggacaagcgcctcggcgggatcatcaccgagtacgtcgacagcatcaccgccacgggcccgctgcaagtggtcttccacttgaagaaaccttttgcgccactgctgtcggcgttgggcagcggcctgcgcccggtggtgcccaagcacctctacgagaacacggattttcgcaataacccttacaacctcaagccggtgggtaccgggccgtttgtgtttgtggaatggaagcgcggcgcctacatcaagctggccaggaaccccgactactggaaaaaaggcctgccccatctggacggcatcgtcttccatgtgatccccgacggttcttcccgtgcggccgcctttgagcgcaacgacgtgcaagtgctgcgcagcggcgatgccgattactctgacctcaagcgcctgagcgccttgccgaatgtgcagtcttcggagaaagggtgggagctgtacgcgggcctggccttcctgcaaatcaacacgcgcaagccgccgctgaacaacccgaaagtgcgccaggcgatcctgtatgcgctgaaccgtcagttcatcgtcgacaacatctttttcggctccggcaaggtggcccaaggtgaattcgtctcgaccacgccctaccacgacccgcagttgccgcagtacacctatgacgtgaaaaaggccaaggcgctgattgccgagtctggcgtggatgtgggcgcggtgcgtattcgcctgctcaatggcgagaagggcggggcgtgggagcgcctggcggaatacaccaagcaatccctgcaacccctcggctttaaggtgcaggtggtgacgtcggatgcggcgacctggttccagcgtgtcagcgactgggacttcgacctgacctacaacttcattttccagatcggcgacccgtacctgaccagcgcctacctgtaccgctccgactacatcctcaagacctcgccattcgccaacgtcagcggctacaacagccccgaggccgatgcgttgtggcagaaagtcgccgacaccccgcaaggtcccgagcgcacgaaactctacagccagttggagaacgtgctgaacaccgacctgcccatcgcgccgatcttcgaaatgcgctacccgacgctgttccacagccaggtgaaaaacctgctgcaaaccgccaccagccttaacgaagactacgaaagcgtctacctcgacgcgcccgcgccatgaacggcgcgctgtatgtcggcgggcgcctgttcaaggcgctgctgatggtggtggcggtgctggtgttgagctttgtattgatccacctcgcgcctggcgatccggcgctgctgctggcgggggaggcgggggtggacgatgtgcagttcatcgagcacctgcgccagaccatgggcctggacaaacccttgctccagcagttgctgatttacctgggcaatatcgcccatctcgacctggggtattcctaccgcaaccagacgtcggtgtggacgctgatcgccgagcgcttgccggcgacgctggccctgatgggcacggcgtttttgctgtcgtcggtgctgggcgtgacgctcggcgtgctggcggcgcgggcgcgacacaagcggcactggctggacggcgtgatttcccacggcgccttgttgctgtatgcgatgccgccgttctggctggcgatgctgttgatcctgctgttttcggtcagcctggattggctaccggcgtttggtatggaaaccgtcggcgcggatttttccttgctcgaccgcgcgcagcacctgctgctgccgtgcttgtctttgagtgtgttgtttctcgccctgtacatccacctgacccgcgccgccgtgctcgacgccctcggccaggaatacgtgcgcacggcccacgccaaaggcttgcacccacggcggattctttacgtgcatgtagtgcgcaacgcgttgctgccggtggtgacgttcgccgggctgcaactcggccaactggccagcggcgcgctgttggtagaggtggtgtattcgtggccgggcataggccgcctgatgtacgacgccctggcccagcgcgactacggcgtgttgatggggggctttctggtgatttcgacattggtggtgggctttaacgtgttgaccgatgtgatctgtcgctttctcgacccgcgcatcggcgccggagggcagggctgatggctgtgttcaaacgctttatgggtcaaccttcagcactggctggcgcggtgtttttactggcgctggccgccctggcaattgccgcgccgtggctcacaggcagctcgccctgggaaatgaatacccagccgatgctcgcgccgttccaggacccggcccactggctgggcagcgatttgctcggccgcgacctgggcagtggcttgctctacggcgcacgggtgtcactggccgtaggcgcgctggccagcctggcgaccttgctggtgggcctggtggtcggcgcgctcgccggttatttcggtggctggctggacggcatgctgatgcgcatcgccgagttctttcagatcattccgcaactggtgttggcggtgattctggtggcggtgctggagccgtcgctggggaccatcgtcttggccatcgcactggtcgcctggccggcggtggcgcggctggtgcgcagtgaattcctgaccctgcgccagcgcgaattcgtgcaggccgcgcgggtgctggggcagtcgccgctggggatcatcacccagcaaatcctgccgaatgccctggcgccgttgctggtggtgatgacttttgtcatggccaccgcgatcctcaccgaagccgccctggcattcctcggtttgagcgacccggaagccatgagctggggttacatgatcaacgcctcccggggtttgttgcgcgatgcttggtggatgagtttcctgccgggcctggcgattgtgttgtgtgtgctggcggtcaaccgggtgggcgaaggcttgcgcgtagcctttgaaccggagaggtcgctatgacgttattgagtgtggagcacctgcgcattgccctgccaccgggcgcggaccgcagccatgcgctgtatgacctgtcgctgcaactgagcaaaggcgaatgcctgtgtgtggtgggtgagtccggctcgggcaagtcgatgctggccagggcgttgttgcgccaattgccggtgccgttgacggtgcaaagcgggcggctggtgtttcgtgaagaagacctggcggcgcgcagtgaagcggccatgcgccaactgcgcgggcgcgatatcagtatggtgttccaggagccgatgagcgccctgaatccgttgttgcgcgtgggtgagcagattgatgagaccctgcgcgcccatggcgttaaatcttcacgcgaacggcgccagcgggtggtggatttgctcggctatgtcggcctgcccgatcccgagcgcctgcgcctggcctatcctttcgaactgtccggcggccagcgccaacgcgtggtgatcgccatggcgctggcgtttgatccggccctgttgatcgccgatgaacccacctcggcgctggatgtgaccacccaggcgcagatcctcgatctgctgcgcaagatccagcaggacaagggcatggcgttgttgtttatcacccacgactttgccgtggtcgaggcgattgccgaccgcgtgctggtgctggaaaaaggtcacgtggtggagcagggcagcgcccgccaggtgttgcgcgaaccccgggcgttgtatacgcagcaattgctggcggcggtctcggcacaacccttggcgccacgcgctgcggtggccggcgcggtggtgctggaggctgaacagttgggcaaggtgttcagcacccgcagcggctggtggaaccggcgcaccacacgggcactggacgcggtgcggttgcagttgcgcgaaggcgagacgctggggatcgtgggggagtccggctcgggcaaatccaccctgggtcgttgccttgtgcgtttgttgcaggctgacagcggccggattcaatggttggggcaggacgtggccgggttgtccgaaaggcgtttacgcccgctgcgcagtgacgtgcagatgatttttcaggacccgttcgcctccctcaacccgcgtcagaccgtgggccgcgtcatcatgaccgggccgttggtgcaggggcgttccagcgccgacgccgaaagccgcgcgcgtgagttactggcgctggtgggcttgccggccacggcgttcgaacgctacccccatgagttttccggcggccagcgccagcgcatcggtatcgcgcgtgcgttggcggtggaacctaaagtgttgattgccgatgagtgtgtgtcggcgctggatgcgctgatccaggtgcagattctggaactgctggagtctttgcagcggcgtttgaaattgagcatcgtgttcatcacccacgacctgagggtggcggcgcgcttatgtgatcgcattgcggtcatgcaaaacgggcgggtggtggagcagggtgagacggcgggtttgtttgccgatgcgcggcatccctatacccggacgctgctgcagtgtgcgtcggctgacgcggcacttgagaccaatgctatctagtgtgggagctggcttgtcgggtcgccgcatcgctgcgatggcaatgtctcagcttgcaggcgtggtggctgacataccgctatcgcaggtaagccagctcccacaggttttaccgagtttcgtcattgaggaatggggtgtttatgagtgccaattttaaagacctgccggtggtgcgcggcgaaaccgtcgaaatccgccccaaccgccacctgagcatcgcccaccacccgggcaccacccaggccgacactgtggtgttcttctgccacggcgccggcggcaacaaggaccaatggcgtctgcaatggcaagcgcttcaggcacagggctacagcctggtggcctgggatttattgggccatggcgagagcgccaaaccccgcaaggcgtcggcctacgcctggacggaactggtagccgactacggggcgatcctgcagcgttacgccgggccacgcaacctgatcgtggcgcactccttcggcacgggcctgaccctcagcaccttgctgacaaggcccgcagcacctgtcgaagcggtgctgttgttgggcacgctgctgcatcgcccggcggccagcggcggcttgttgtcgttacccgcgtgggttctggaatggctgcgcccgctgctggccaaggggttccgcgaacgcgcctggcattccaccgctgacccggcgctggtggcctatgaagaaaaactcaccgaacgcaacccgctgtacatgttcaaggcgctgatgaataacgccagttggcccgacgctgggcagattccgggcctgacagtgcccatcagcattctggccggtgacagcgacggtctgacccccgccagcgccgggcaggcgttggccgagcggttgccaaacgcgcggttccaggtgcttgcgcaatgtggccaccaattgatgctggagaaacccgaggcggtgcttaaagcgttcagcgcgctgacggaataaacccgtgccctgatgtgttgtattggctcattgttccgttttcgagatttgccatgagcaacaccaccgagcccctggtccgcatccgcgacctgagcaagaccttcggcaccgtgcaggcgctggatcaggtcgacctggatattcaccccggagaaggcgtggccttgctcggggccagtggtgcgggtaaatcgaccctggtgaaaatcctcggcggccggttggcggcgcagggcggagatgtctgggttgacggccagcggcagcgctttacctcgccattgtcggcgcggcgcgtgggcattgtcgcagtgcatcagcgccccgacgaaggcatcgcccccggcctgagcgtggcggagaacctgttgctcgatgagctgtgcctgccgggcgcggatttcctgctcaaccgcaaaaacctgttgctgcgcgccgaagccatcgccgccgtgttgggcctggacctgccgttgcaacacccggtagaacgcttgggccaggcggaccgacagctactggtgctggcccgggcgttcgctttacagccacggctgttgatgctcgacgagccgacggcagccctgtcggacgcggatgccgagcgcctgctggggctgatcgatcggcaacgcaatcgcggcatggctgtcctgtgcatttcgcagcgggtcgccgatttgcaacgggtcacgagccgtgcagtggtgctgcatgagggccggctgggctttaaccgccagcgcgccaaggcgcaggctgtcagcgcggcgtggggataaacgctacgctgccaccctcacgcttctgaaacagccgctcgccattatccggctgggtggtgaccacctgatgatcggcgcccaggtaggccaacggtgtcgggtcttccttggaatactgcgcgaggataatcgtgcgttgcgggtcgaagtgtcggccgctggttttttccagccaggccatgaaggcggcgctgtcgccctggcgcgggaagtcctgggtttcgctgacgtagtaaaacggtttgccgccattttgcaggtacatcggcagcttgttgtcgacttccaccatgaccatctgccaatcgctccatggcgcggtttgctgcgcctgggtttgtacgtcccgggcaaagcgggtcacgccgccgttgccggtggtccaggggtagatcacccctaacaccagcagcaataagcctgcggtgaagccgaagcctttttgccagcgtggccagctcgcggttttttgctcaaggcgttcactcagccaccaagccgccagcagttgggcgaagggcaccaagggcagcacgtagtaactgcggcggctgccactggcggtgaagaacaaaaacagcaggcccaggccccacaccagccagcgcacgttgggcggcgtctggcgccagtgccgcagcgccagccacaggccgagtacccagcagggcgcccacggcaaggtgtaggcgggcaggtagatcaggtaggtgtagatcggccccatgtggtcgaaggggtcgaaaaagcgtacgacgttttctttgaataccagcgccaggccgctttcaccgtaggtcggtgcgccgtaaaaatgcgacagcacgaaggggattgcgtagaacgccgctgcgatcaacacggccagcagcaggcgcaggttgaggtggcgtttgtagcggtgctcgctgagcaggtgcggcagcaataccaggcctggcagcacaaaaccgatcaagcctttgaacagtgaggtcgccgccagcagcaggaaaaacaccgtgtagcggcccagccgtgtgtcgtccggcccgcgccagtaccaccacacggacgccagcacaccgcacacggtcagtacatcggcggtggccactcgcgcccagaacaggaagtagaagctggtggcgagcatccagccggcaatcagcccggtgcctttgcgaaacaggcgctcgccgagcaggtacaccagccagatgctcagccacgccgcgatcaccgacgacaggcgcagtgaccacgggccgagcccgcccatcaggttggctgcgcctgtgatcagccaataggaggggagcggtttgtcgtagtacggcgcgcccttgaggtaggggtcgaagtagtcaccgctttgcagcatttgcagggcgatattggcccagcgggtttccggcccccacaagtcgcggctgcccaggcccagcagcaggagaagcgccgagacgcccagcagcaacaccaatgcgccacgttcggttttccagtagctcattggggttttcctgtggcaagccagacgttaaggaagctgcgggtaaatgatcatgagcatggggcccttgcggtagcgcttgccgcccgggggcagttgcccttcttcacggtgttcgctggtgctgcgcacgcgcatcaacacgccgaccgagccctgtttacgtgcctcgccgagccatggctggacattgtccagggtgaccttgcgatgggccgagtccgcgtatttaaggccatagcgcaattcgccttcggtgtcgtaaagcgccacttcgggccggcgcaggcgccaggacaatgccgacgccgtgcccaactcgttgctgatcaaagcattggtttgttgcaattcatccagatgctccagcacaaactggtcgggcatttcggtatcggtgatttcctccggcatgcccgccggcagcagggccaccagcacgccgattgccagtgccggcattgcccacagtgtgagtggccgcgacacctgcaacaggttggcgaggatccagcccagcagcacgataaagctcagggacaggctgaacatctccgcgtggctgttgctgtacatcgggttgtcgacctgcaggtaaatcagggccgccatcgcgcctgtgccgatgaccaggttcagcaggccgttggcgcgcagggcgcgtgtcttgccgcggttgatcaggtcgatcagcgtgtgtcccatcagcaacgccaacggcaacaggcagggcatgatgtaggttggcagcttgccgcggctcatgctgaaaaaggccaggggcagcagcagccacagggcgagaaaaccaatcgctggctgggctttgtctttccaggccttgagcagggtgaccggcaacagcgcggcccacggcaggcacgccaccaccatgatcggcaggaagaaccaccaggccctggcatgttgcgcattatcggaggagaagcgccgaatgtgctcgtgccagaagaagaaacgccagtagtccggttcctgcagatgcaccgcccacacccagggcaggcacaccagcgcggcaaccaggatcgccagcgggccatggcgcaacaactcgcccaggcgtcgttgccaggccatgtacggtacggcgatcaatacgggcaacagccacgccagaaaacccttggtcaaaaagcccatgccacaggcaaaccccagcagtgcccaggcgcccaaccgatgcttggccgggcgcccgtcgagggcaaaccacagcgcgaccaggctgaggttgacccaaaaggtgaattgcgggtcgaggttggaatacccggcttgcccggccaccagaccaaagctcatgtagagcagggcgctggcaaaacttttgcgcgggtcgttccacaggcgccgtgcgatgaggtaagccaacagcacgctaaggcccgtggtcagggccgaggcgatgcgcaccccgaacaggttttcgccaaacacggcctggccgagggcaatcagccaatagccggcagccggtttttcgaagtagcgaatgcccatgaaatgcgggctgacccagttgccgctcagcagcatttcctggctgatctgggcgtagcgggtttcatcagggatccataaaccgtgcaggcccatgggcagtagataaaacaccacgaaggccaatagcaacaaatgcaggggtttgatacgggtcatgaaaacgtcgctccttgacgttcaatggcgggaaatgtgtggagtaaagtaatagaagagaaagtcacaaagttcactaagtcgctgaaattattcatgacgccgccaaataacgcgcgcagttaaacatgccagaagaggcctgtcgttttgctgaacatgaaagaaagtataggtaaaaaagtgtctagagcttcttcagaactgccagccaggcctggctgttcatgaggcccagggtctcgaacttgccgttgggcagtacgcgcacaaacaaggcgctgccgtagtgggggaaggcggcgcgagggtagcccagggcgctttcgaagtcggcgatgcagccgctgtgggtcacgaacaccaggttacgcccggtctgtttgcggctgagcaattcctcgcccatggccgcgccgcaaatggcttgctggccggacgtcagctcggcgttgccgaacatggcgtgggcagtctgggccgtgcgaaccgcggggctggcgactacatcgctgctctgcatgcccagtgccttgaaggcttttcccagctcttcggcgcgttcgctgccgacgattgtgaggccttccggcgggccgaggcaggggttggtggagcggtcgcaacgctcttcatggcgcaccagaacgatcaggtcgccatcgcgccagctgggcaatactttggatgtgagcaggcgattgcccacgccgaggtcacgcggcgatgacggccagaacatgaaaccggtcagcagtaaaccaaccacggcaacgcctgcgccccactttcgtaatcgcttgatagtggcgcggcgcgagcgcggtttggtcagggtaaggtcaaccacatcattcaccatgggcactgttgcaatgttgtattaattaggcgcaacgcatttacggatacccgtagttgtgcgagagcctgtcacagggctgctgtcttttcgctgaacatccagcggttaaaagttgccgggcgcggcaactaaaaagttgccgtttatcagcacatggcgggcaatttagagaggcgggggtgggcaggcagtgaaatccatgtgaaaaatttgcgtagggccgtcggtgagccgttattctcgtttgcagtccttcaagcgagcgttcttatgttgcaggtgcaaggtgttctgaagcgttacgccaccccccaagggccgctggtggttctggcaggtgtggacttgcacttgggtgagcgcagcagcctggcgctgatgggcgagtcgggcagtggcaaaagcacgttgctgcatttggtcgctggcctggatcgcgtggacggcggccgcatccaggtgggtgaacaacgcctggaccaactcaacgaagcgcaactggcccactggcgccgcaccgaaatcggcctggtgttccagcaattcaacctgatcggcagtttgcgcgtggaagacaacttggccttccaggcacgtttggccgggcgttttgacccgcaatggcaagccgagttggtggcgcgcctgggcttgggcgacttgctcaagcgctaccccgaacagctctccggcggccagcaacaacgggtggcggtggggcgcgcgctggcctcacggcccggcttgctgttggccgacgagcccaccggcaatctcgacgaagccaccagcgatgaagtgctgcagttgatgctcgacctgctgcgcgacagcccgaccagtttgttgatggttacccacagcccacgtattgccgcacgcctggatcagcaggtggtgctgcatcgcgggcgtgtcgtgcctgcggacgcgcgctgaaatggccgtattttattgggccttgcgcgcactgctgagccactggcggcgccatcccgtgcagtttttcagcgtgctgaccgggctgtggctggccaccgctttattgaccggtgtgcaggccctcaacagccaggcgcgggagagttacgcgcgtgccagccaactgatcggaggtgaaccccaggccagtttgagagcgccggatggcgcggcgttcccgcaagcgctgtttgctcaactgcgccgcgctggctggccggtgtcgccggtggtgcaggggcgtttgctgctcaaggggcatgaggatcagcgcctgcaattgatggggatcgacccgttgtcgttgcccggcagtggggtggtggcggggcaacgtttgagccaggcgcaaatgctcgcgtttttcgaaccgccggggcgcacctggattgctccgcaaaccttgcaggcactcgggctgcacgaaggtgagcaacccctgactgccagcgggcaggcgttgccgcccttgcaggctcaacaggacatggcccctggcatgctgttgacggacatcggttttgcccaacccttgctggcaatgcccggccagctgtcgcgcctgctgctggacaaggcctttgccgcttcgcatcccacgccaccggtggcactgcaactcaaacgcagcgaagacaacaacctcgcgcgcctcaccgaaagctttcacctgaacctcgatgccctgggtttcctgtcgtttgtggtggggctgtttatcgtccatgccgccatcggcctggcgctggaacagcggcgcgggttgctgcggaccttgcgtgcctgtggggtgagtgcgcgcatgctgatcctcagcctgggcgttgagctgggcgcgttgtcgttgttgggcggtgtgctgggcgttgccagtggttacttgctggccagtgtgttgctgccggacgtggccgccagtttgcgcggtttgtacggcgccgaagtgccggggcaactgagcctcagcccctggtggtggctggcgggtttgggcttgagtttgctcggcgcactgctcgccggtgccagcagcctgtggcgggcggcgcgtttgccgttgctggcgctggccaacgcccaggcctggcatgaggcccatgggcgctggctgcgacgccaggcctgggtcgctgcgacggcgctggtgatcgggttgctggcgctgtggctgggcgacagcctggccgccggctttgtgctgatggccgccttgctgttgggcgctgcgctgggcttgccggtggtgctcaatggagtgttgaaggctgtactggggcgcagccgctccgtgctgggtcagtggtttcttgccgattgccgccagcagctgccggccctgagcctggcgctgatggccttgctgctggcgctggcggcgaatatcggcgcgggctccatgacctcgggctttcgccagaccttcaataactggctggaacaacgcctgaccgccgagctgtatgtcaacccgcagaatccggcccaggccgagcaattgtcgacatggttggcgcagcaaccgctggtacaaaccgtgctgcccgcctgggaggtctcgttgcaattgcagggttggccagccgatctatttggcgtgatcgacgaccccacgtatcaccagcactggcccttgctggaggtagccagcaagccgtgggagcagttgctcaacggcgacagcgtgatgctcagtgagcaaatcgcaaggcggttgaatgttcacttgggcgacgcggtaaacattcctgcgcctcagggcgtttggtcgcctcgagtcgtggcgatttatgccgactatggcaacccgaagggccatttgatcgtcaactatcggcacctgttggcgcattggccaacgttgtcaccggtgcgtttcaacctgcgggtactgccgcagaatgtgcctgcgttggtgcgtgaaatgcagcacgccttcgccctggaagacagccgcatcgtcgaccagcagcagctcaagggctggtcgagccaggtgttcgagcgcaccttcgcggccaccgctgcgctgaacagcctgaccctcggtgtggcgggtgtggcgctgtttatcagcctgctgacccagagccaaagccgcctcggccagctcgcaccgctgtgggcgctgggcgtaacccgacggcaactgatgctgcttaacctgggccagacgtggctgctggccgtgctcaccttgattctcgcgttaccgctcggcctgctgctggcgtggagcctggacgcggtgatcaacgtgcaggcgtttggctggcgcctgccgctgcaggtgttcccgtggcagttggcgcaattgttgggcctggccatgctcgccaccttgctggcctcggcctggccgctgtggcagttgtaccgcagccgcccggcagatttgttgaggacctttgcccatgaagattaaagcgctgttgtgcgccgcgctgttgctgctcagtgcatgcgaccaggcgcctgcgcccgaagagagctttgccgggctgggcagcgatgcggcggactttgcccaggtggtgccgggcaaggtgttcagctttcccgaagaccacggcccgcacgacggctttcgcatcgagtggtggtacgtcaccgcgaacctcaaggatgcccagggcaatgtattcggcgtgcaatggaccctgtttcgcaacgcgttgaaagccgggcctgtgcagccgggctggcacgactcgaccgtgtggctcggccacgccgccgtcacctcggccagccggcattacgcggcggaacgcttcgcccgaggtggcgtggggcaggcgggggcccaggcgatgccgttcaacgcctggatcgacgactggaatttcgccacccgccctggcgccgcaagcccgttggcggacatgcaactcaaggcgggcgggccgcaattcgcctacgacctgcacctgacatcgagccggccgctggtgttgcagggcgaaaacggctacagccgaaagtccgatcaggggcaggcgtcttactactacagccagccgtttttcaccgccgaaggcagtgtcagcatcgacggcaaaacgtacgaggtcagcggctcggcctggctcgaccgcgaatggagcagccaaccgctggcggccagccagaccggttgggactggttctccctgcacctggaccgtggtgaacaattgatgctttttcgcgtacggcaaaccgacggcgcgggttacctgaccggcacctggatcgacaaggaaggccacaccgaaaccctgcacaatgccgatatccagcttacgccactggcgactaccgacattgacgggcgccacattcctacacgctggtcactgaaaattcctggcaagcagctggatatcaccaccgaagccgtcaacccgaaagcgtggatgaacctgagcattccttactgggaagggccggtgaagtttgacggtggggtggggtatctggaaatgaccgggtactgacgccatgcaacggattgtggccagcaccctgaagtaaaagatgaacacatgtccctgtggcgagcgggcttgttgtggtgagcgggcttgccccgcgttgggctgcgaagcagcccccatcacagccaccgcgttttgcctgacactctggagccagccttaatggggctgctacgcagcccaacgcggggcttttgtcactcacgcgccagcgccaacctcaacggcagcctcgccatgctcgtgcttttcagcgagcccaggtacagccagtcgccatattcacgggccgtggtgatgggcgagtaattccccgcgctgccgtcctgcaggttggcgatgacgttgccttcggtgtccagcccgagcacgaaggctttgcgctcgacgggcttgggcaccaccatcagcgcccgaaccatcaccttgcgcaacagggggtagccggcgaagccatccagcagtgggttgcgcggtgagtacagggcgacccagaagcggtcgcggccgttgaaactgaggttgtccggcaggccgggcaggttgtcgataaacaggtcgtggtggccggcgcgctcgcctttgagccagtagcggctgatgcggtaggcaccggtttcattcaccagcacatagttttcatccgggcccagcgccacgccgttggcgaattgcaaatgctcgagcagcacctcggtggtgccattgctgaagtcatagcgcagcagccggccatcgccgccgtgctcgatcacggcctcgccatcttccccgtagccccagcggctggaggcgtcgctgaaatacgcgtagcgcccgccggcgtccacggtgacatcgtcggtgaaaccgaaaggcacgccgttcgcgccggtgctcaaggtgatgagccggcggttggcatccagggccagcaggcctttgacgccgtcggcgatgatcaagcgcccgtccgggtgccgcgccatgccgagcgggcgtccgccggtgttggccagcacttcgagggtgtggctgtcaggcgaggtacggatgatgcgcccgtcctgcagcccgctgatcagaaagccctgagcatccagcaacagagcttcgggcccggcgatgccctgggcgccgattttttgtacgtctttgaggcgctggttttcagcgtatgggccgtctttcatcgagggggctttggggggcgcccagttcactggctggactttggtcggcatcaacagcagaaaggcgatcacggcgagaaacagcacaaagagtaaatggcgtaattttttggggcgggtattcatgacgacttccggttgtcgtgggcgttcggttcccagtgcagcgtgccgaataggtagtccatcaggggcaggacgatattgaagttgcgcccctgcatcagctcgcggcggtggtgcagggcgtgcaggtggtgcatctggcgaatccacggcaggcgtgccactgggtgagctgcgggcaggtgttcgcaggcgtggaaggtttcgtagagcaggtagccgaggatcatgcacccggcgaacagcccggccacgttggggctcagctgtttgagcagccaccaggcggggagggtgatggccaggctgtgcaacacgatgagccaggcggggaacaggatcacgcgccagtcgcgggggctgtcgaaggtcatgtggccgggggtgaagaagctgtggtggtcaccggtgtggcgcgcatagaacaaccggccgagggtgtgtttgtgatggccgaggtggcggtgcacgaggtagatgcacaggttgaagaagatcagggtcagggggaccgtgaaccactggagtggggtgatgttttcggtggaggaccaggccagggtgatgcaggtgatgccgtaggcgagcacgaatgtggcgtggagccaggggtcgtagcgcgatgacacatttgcgcggtagtgggcgcggaaggtctcggttggatgggccatggtggaacactcagtgtttttttgttggagggtgagcttagttggcggtggaaaatgtgcgagtttttgcgtcatgcacgtatcaactgtgggagcgaccgaccaacggcctcttgcacgggctgaatttccttgttagcttctgacaaaatgttatcgataacatttgctctaaaaataaaaacaaaacagagacccacgccatgaaaatgctcccgaaaaccctgtgtttactggccgccagcatcaccctcggcactcaagcattcgccgatacccccaagcccatccgtatcggcgcctcgttccaggaaatcaacaacccctatttcgtcaccatgaaaaacgccctggaagaagccggcgcgaccatcggcgcgaaactgatcatcaccgacgcccgccacgacgtgtccaaacaagtcagcgacgtcgaggacatgctgcaaaagggcatcgacatcctgctgatcaaccccaccgactcggtcggcgtgcaatcggcggtcaaatcggcccacgccgcaggtgtggtcgtggttgccgtagacgcccaggccgacggcccgctggactccttcgtcggctcgaaaaacttcgacgccggcttccaggcctgtgagtacctggccaagaacatcggcgacaaaggcaacatcgccattctagatggcatcgccgtggtgccaattctggagcgtgtgcgcggttgcaaagaggccgtggccaagcacccggacatcaagattgtcagcgtccagaacggcaagcaggaacgtgaccaggcgctcaccgtcaccgaaaacatgctgcaggcccaaccgaccctcaagggtattttcagcgtgaatgacaacggctccctcggcgcgttgtcggccatcgaagccagcggcctggacgtgaaactggtcagcgtcgacggcgcgccggaagcgatcaaggcgatccagaaaccgggcagcaagttcatcgccacctcggcgcaatacccgcgcgaccagatccgcctggccctcggtatcgccctggccaagaagtggggctcgcaagtacccgccacgattccggtggacatcaccttgatcgaccaggccaaggccaaggatttcagctggtaaatcacctgggccccacgcaaaccgtggggcttgaggtttccttctgaatacggggtcggcggtatgagcagtcttctgaagctggaaaatatctgtaagcggtacccgggcgtacaggccctcaagtccatcaacctgcaagtggagcgcggcgaaattcacgcgttgctcggggagaatggcgcgggcaaatcgaccttgatgaaaatcctcggcggcgtcgagcatcaggacgaaggccggatcctgatcgatggccaggcgcagcaattcgcgacgtaccgcgatgcgattgccgccggcatcggcattgtgttccaggaattcagcctgattccctacctcacggcggtggaaaatatcttcctcggccatgagctgagcaaccgcttcggcctgttgcgcaagcgcgaaatggtcgaggcatccgaagcgttgttccagcgcctgggcgtgaccattgacctgcaatgcgccgtcaagcacctgagcgtggccgagcagcagttcgtcgaaattgccaaggccctggccctggatgcgcgcctgctggtgctcgatgaacccaccgccaccctcacgcccagcgaagccgaactgctgttcgatatcatgcgcgagctcaagcgccagggcgtggcggtaattttcatctcgcaccacctggaggagattttccaggtgtgcgaccgcatcagcgtgctgcgcgatggcggcaatgtgggcgtgacggatgtggccgacagtgatatcgaccgcctcgttgaaatgatggtgggccgccgcctggaacacagttttccgcccaaaccgactcaagcgcgcggcccgttgctgctggaagtcaaagacatccagctggtgcgcaacggcccccacaacagcttccagttgcacaagggcgagattctcggtttcgccgggctggtcggttccggccgcaccgagctggcgctgggcatgatgggcgcgctgccgtcggtgagcaaagacgtctggctgcgcggcgagaaagtcagcctcgacgacccggcccaggcgctggctcacggcatcggtttgctcccggaaagccgcaagagcgaagggctgattaccgatttcagcattcgcgaaaacatctccctgaacaacctgcccaagtatcagaacgcctcgggcttgatcgacaagggccgtgaatgcgcgagtgtcgaaggcctgatgaaacagctgtcgatcaaggcgcccagtggcgaaagccgggtgttcaacctcagtggcggcaaccagcagaaggtggtgatcgcgcgctggatcaaccaccactgcgacgtgctggtgttcgacgaacccacgcgcggcatcgacgtcggcgccaaggcgcagatctacacgctgatgcgcagcctcaccgaacagggctacgcgatcatcatgatttcttccgaattgccggaagtcatcggcatgtgcgaccgcgtcgccgtgttccacaagggcgccatcgtcaaggtacttgaagcgtctgccgtcaatcctcaagaggtcatgcgccatgcaacagggggctcaagtgaatatgtccattaaaaccgccgacagcgcccggctgcgcctgaacctggcgcggctggtgcgctcgccggcgttttatccctttgtggggctggtggtggtgacgctggtgatgattctcgccagcgacaccttcctgaccaccagcaacctgtcgaacatcgcccgccaggtgtcgatcaacgcgattatcgcggtgggcatgacctgcgtgattctcaccggcggcatcgatctgtcagtgggcccggtgatggcgctgtccggcacgctcacggcggggctgatggtggcgggcctgccgccaggcctggcgattggcgccgggatgctggtcggtgtggcgttcggcatcggcaacgggctgttcgtggcctacctgcacatgccgccgatcatcgtcacgctggcgaccatgggcatcgcccgtggcctgggcctgatgtacaccgacggctacccgatttccgggctgccggactggttcggcttcttcggccgccagagcctgttcggcattgaagtgccgatcctgatcatgctgatcacctatttcgccgcctacgtgttgctgcagcacacgcgcatcggccgctacatctatgccatcggcggcaatgaagaggcggtgcggttgtctggcgtgcgcgcggcgcgcttcaagttgctggtgtatggcatcagcggactgaccgccgcgattgccgggctggtactcacgtcgcgcctgatgagcggccagccgaatgccggcgtgtcgttcgagctggatgcgattgccgccgtggtactcggcggcgcctcgattgccggtgggcgcggggtcatcgtcggcactttgctcggtgccatgctgctcggcgtcttgaacaacggactgaacatgctcggggtctcgccctacgtacagagcgtgatcaagggcgggatcattttgctggcgatctttatcagccgtcagcgccataaataaacctcttacaagaacaggaccgaaaaccatggacaagcacaccgaaatgcaagccgtcgtctgccacggcccgaaagattaccgcctgcaacgcatcagcaaaccccaggcgcgccccaatgaactggtgatccgcatcgccgcctgcggcatttgcgccagcgactgcaaatgccactcgggcgcggcgatgttctggggcggcgacaacccgtgggtcaaggcgccggtggtgccgggccacgagtttttcggctacgtggtggaagcgggtgagggcgccgaggagcactttgaggtcaaggtcggcgacaaggtgatcgccgagcagattgtgccgtgcggcaagtgccgtttctgcaagtccggcaagtactggatgtgcgaagtgcacaacattttcggcttccagcgtgaggtcgccgaaggcggcatggcccagtacatgcgcattcccaagaccgccatcgtgcacaagattccggagtcggtatcgctggaagactccgcgctggtggagccgatggcctgctcgatccacaccgtcaaccgtggcgacatccagctcgatgacgtggtggtgattgccggcgcgggcaccctcggcctgtgcatggtgcaagtggccgcgctgaaaacgccgaaaaaactggtggtgatcgacatggtcgacgagcgcctggaattggcgaaaaaattcggtgccgacgtggtcatcaacccggcccgtgacaacgcccgccagatcatcaatggcctgaccgataactacggctgcgacgtctacatcgaaaccacgggcgttccggccggcgtgacccaaggtctggacctgatccgcaagcttgggcgtttcgtcgagttcagtgtgtttggcgccgagaccagcgtggactggtcgatcatcggcgaccgtaaggagctggacgtacgcggcgcccacctcggcccgtattgctacccgatcgccatcgacttgttcgaacgcggcctggtcacctccaaaggcatcgtcacccatgacttcccgctggacgactgggccgaagcctttgagctggccaactcgacgaagtcgatcaaggtgctgttgaagccggtgatttgaaaatgaactacatcatgggtgtcgacatcgggacccagagcaccaaggcgctgctggtggatggtcaaggtacgatcatcgcccagcacagccaggggtatcgtgtggataccccgaaagtgcgctgggccgagcaatggccgcaggtctggctggacgccgtcgaggcgtgcgttttgcgctgcatggaaaaggccggggttgcccgcgagcaggtcaaggcgctgtgcatcagcagcctgtatggcggctcggggattgcggtggatgcgcacatcacgccactgcacccgtgcctgatctggatggaccgccgcgcaggtgaacaggtcgcctgggtgcgggagcatgttgaccttgagcgcctgttcgaaatcaccggcaactcggtggacagctactacggcttcaccaagatgctctggctcaaacagcatcagcccgaggtgtgggccaacacacgctacttgctgccgcccaacagctacatcaactggtgcctcaccggcgagttggcggtggaccacagcagcgcgggcaatatcggcggcgtctacgacgtgaaggcgcgcggttggtcagctgaaatgctcgacgcgctgggcatcccgcaggcaatgatgcccgagcggttggtgtattccggcgaggtggtgggcggcttgcagggcagctgggccgcgcgcctgggcttgccggcgggcacaccgattctggccggtggcgtggatgcggccatggcgacgctggcagcaggcgtgacacagccgggcaaccatgtggcgatgatcggcacgagcatgtgctggggctacttgaaccagcacgtggacgcgcaccatggtttggtgagcatgccccatgtctacaacggccatcaggacctgtacatctttggtggcgcgatcaccgccggggcctcggtcagctggtttcgcgagcagttctgccaggctgaagaacaacaggccaaaaccaccggccaggacagcctggtgctgctggagcaagccgcgatgaagatcccggcgggcagcgaaggcgtggtcttcctgccgtatttgatgggtgagcgcagcccggtgtgggatgaccgcgcgagcggcagttttgtcgggctcaacctctaccacagccgcattcacctgtaccgcgcggtgcttgaaggggtgagctttgccctgcgccataacatcgaggcgggcacgcgcggtgcgcattcgctggacccgcgcctgattgtggtgggcggcgcgagccattcggatttgtggatgcagattattgcggacgtcacgcgctacccggtttacaccattgttcaggaggtggaagcggcactcggcgcggcgctgctggcggcgcacacggtggggttggtgagtgacggggagatggagaagggttgggtgcagctcgaattgagggcgcagccgaagcgcgagaatgtggcggcttatgagcaggcgtttgccgagtatttgaagttgtatcccgcgctgaaaccgatcatgcataacctgcaaaccaattgaatcaacaccttccaatgtgggagctggcttgcctgcgatagcggtctatcagtcatgcaaatgtgacggatgtaccgctatcgcaggcaagccagctcccacaggggatcttcatcgtctatggaacagtgaccatgaacgcagtctttgacttcacccaccaacgcattctcgtgaccggcgccagcagcggcattggccgcgaaatcgctttgcaactgattgccagcggcgccgaggtctttgcccttggccgcgatgctcaggctctcgctcaactcggctgccaaacgctgtgcctggacatcgccgacagcgccgccctcgataaagccctgcaagctctgtcgcccttgcacggcctggtcaactgcgccggcatctcgcgcctggaacccgccgctgcgatcagtgccgaggcgttcgaccaggtgatgaacgtcaacgcccgcgctgctgcacaagtcgccagccgggtcgctgcgaagatgattgacgcgaagatcgccggccgcatcgtcaacgtctcaagccaggcgtcgctggtggcgctggacgatcacctcggctactgcgcgtccaaggccgcactggacgcaatcacccgcgtgcagtgcgccgaatgggggcgtttcgggattcgtgtcaacagcgtcaaccccaccgtgacgctgacgccgatggccgcgatggcctggtccgaaccggccaagcgcgatccggcgctggcggcaattccgctggggcgttttgccgagccggcggaagtggcgatgccggtgctgttcctgctcagtgatgccgcgagcatgatcagcggcgtcagcctgcccatcgatggcggctacaccagccgctagccgttttccagctggcctgcgatgaccaccttgtcccttggtttgaacgggtctccgaggcggtccagcagtaggcgcacggcgctgcttccggccaaggaggcgtcatgcgccacgcaggcaatgggcacgccgaagatatcggcgaagggcaggcggtcgatgccgcagatggtcaggctgtcatgggcgatgttgtgcatgcgcagggcccgcagggcgccgagggtgatcaactggttgaagcccatgatcgcgtccggcgccgagtgttcggccaggtaatcgagggtgtgcaggtaggacggcatcaacgtgtagtcgcccgcctgcacttcaacgtgcacctgcggatgctcggcgagcacttcgcgcaggcccttgaggcgctccacggtaatgcgtgaatgctcggggccggtcagcaccagcaggcgcttgaggttcggggtttggcgcagcaggtagtgggcggcctggatgccgctgtggtaattgtcgagcaccacgcggctgaacgggctgtcgtggatcgtacggtcaagcagcactaccggggtcttgccgttgcccaggcgttccaggtaatcgggttggtaatcaggttcgtcagagaccggtgacaggatgatccccgccacgcggtagcccagcagggtgtccaccgctttgctttccagctcttcgagttcgtcggtgtccaccagcatgatggtgtagccgtgttttttcgcctcgcgggaaatcgccttgatcatctcgctgtagaacgggttgtccactgacgcggtgatcaccccgatgatcaggctttcactgcgcttgagcccgcgtgcgaaggcgttgggcacgtagtccagctcgcgcgccacctcaaggatgcgcgccagggtggcgggcttgaccaggtcgggtttgctcagggcgcgggacaccgtgatggtggtcatgccgacccgtttggcgatgtcgctgatggtgacggactttttcttgttcatcggtcaggctgcaaaaggaaacacccgcaggctagcacgcgcgcgctcgcagggggcttcaaatcagcgggtcccagcgttgcgaccagtcactttcagccttgaccacgccgcgcagcaactccagtgcctgttgcaacaccgccgaatcccgcgcccgtgagtacaccaggtacgtcgggaagctgaactccggcgccttgggtacgcgctgcatcacgccgctgtccaggtaactctgcaccacgcgggtacggaagtagccggcgccgccgttttccaggatgtactgcaaggccagtgggccgaggttgaaactcagggcggcgcgggccttgtcgggcagggcggcgtcgtgttgctgacgaaaaccggggccccaatcgatatacacgtagggcgccgggttgctcgccagttgcaccaggatcagcttttcttccagcacctgctccacctgcaagccgggccagtattgcggctggaacactagcgcggcatcgagtacacccagttccagctggcgcagcaggtagtcaccttcacgcacctcggtgcgcagggcatggccggggatgtgttggcgcagggcctgggcccaccccagcatcagcgggttgcacaggctgacttcaccgccgatatgcagcacgttgcggtagccatccggcagcggcaggtcgcgttttgcggcttcccaggtttgcagcaactggttggcgtacaccacaaaagcctcaccgtccggcgtgaggcgtgccccggcgcggttgcgcacgaacagcgtgctgcccaactggctctcgaggtttttgacccgtgcggtgatcgcggtctgggtgacgtgcagtttctcggccgccgcggcgaggctgccgcagcgggtgatttcgaggaaggtgcgtgccagttcgatgtccatgaaacccccggggatgaatgggggacagtgtaatggaatgtgctcaaaaactgtgggagcaggctttatgtgggagctggcttgctcccacagttgactgcatttcaggttggggtttttggggcttgcagatgctcggtggggaatgcgttggcatacgcctggcacacccgcagcacctgttcatcggcaaaccgcgcccccaccacatgcaaccccaccggcaacccgttcgccgccagcccgcagggcactgaggcggcgggttgctgggtcaggttgaaagggtaggtgaacggcgtccactccatccattcttccatgcgtgatcccggtggcacattgtgccccgcctcaaacgcggtgatcggcatcatcggcgacaccagcacgtcgtaatgctcatgaaacgcggccatccgtgcgaccagtgcggcgcgggcttcgagggcgtcgttgaaatcgcgcaggctcagttgctcgccgcgtctggcaatgcgcagcaggccggggtcgagcaggtgtttttgcgcatcgctcatggcacccgtcagacgtgcggcgccggcggcccataaggtgctgaacacttccagcgggtcagtgaagcccgggtcgatctgctcgacatgcgcgcccagttgcaccaaaccgtcaactgcccgggcgacgaccttggccacctgcgggtcgacgtccacatagccgaacgtggggctgtaggccacgcgcaggcctttcaggtctgtacccggcttgagccatggcgtggtgcgcggcgcgccgatcaggccgtcgcgtgcatccggctgcgccacggtttgcagcatcagcacgctgtcttccacggtgcgggtcatgggcccaaggtgcgagaggatggtcatcgagctggccggccattgcggcacataaccgaacgttggcttgattccgaaggtgccggtaaaggcgcagggaatacggatcgaaccaccggcatcgctgccctgatgcaacacccccaggttcaatgccgccgccgcgcccgcgccgccggatgaaccgcccgccgtggtgcgggtgtcccacgggttgcgggtgatgccgtacagcgggttgtcggtgacgcctttccagccgaattccggggtggtggtcttgcccagcagcaccgcgccggctttgcgcatgaaggccgggaagggcgcgtcgacatcccatggcccttcggcggatgaagtgcgcgagcccttgcgggtaggcatgccgatcgtcagcgtcaggtctttgatggaacacggcacaccgtccagcgggccacagggttggcctttaagccaacgttgctcagaggcgcgcgcggcatcgagcgcgccttgcgggtctacgtggcaataggcattcaccgccgggttgaagcgctcgatacgcagcaaggcatcttcggtgacttccaccggtgacaggcttttgtcgcgaaagcgctgcagcagttgcactgccgtcagttggccgacctcactcatgccacatccccctgcgccgcattgaccatggcgcgcagtaacaccgcgcagcccgctgcgaggtcgtccggcgcggcgttttcgatttcgttatggctgatgccgccttcgcacggcacgaagatcattcctgcggggcccagttcggcgacgaaaatcgcgtcgtgcccggcgccgctgacaatgtccatgtggctcaggcccaggacctcggcgccttcacgcacggcgttgacgcaggccggggcgaagtccaatggcgggaagtcggcggtgggggtcaattcaaaggtcaggccatgtcgtttcgccgtggctacgatcacaccgcgcacttcatcgaccatggcttgcagcttgtccgcatgcaggtggcgcaggtcgagggtcatgtgcacctggccgggaatcacgttgcgcgaaccggggtgcaggctcaggcagccgacggtgccgcaggcgtggggctgctgttgatgagcgatgcggttgaccgcgctgaccacctcggcggcgccgaccaaggcgtccttgcgcaggtgcatcggcgtcggcccggcgtgggcttcgacgccggtgagcgtcaggtcgaaccacttctggcccaggcagcccatgaccacgccaatggtggtggccctgtcttccagcaccgggccctgttcgatatgcgcctcgaaatacgcgcccaccgggtggcccagcaccgcgcgggaaccggcgtagccgatgcgctgcaattcggcgccgaccgacaagccttggtcgtcgagtttgtcgagggtgtcctgcaagtcgaacttcccggcaaataccccggagcccatcatgcacggcgggaaacgcgaaccttcttcgttggtccacacgacgacttcgatgggggcttgggtttcgatattcatgtcattcagggtgcgaatcacttccagcccggccatcaccccgtagcagccgtcgaacttgccgccggtgggctgggtgtcgatatggctgccggtcatcacgggtggcagggcgtggttgcgcccggcgcggcgcgcaaagatgttgccgatggcgtcgaccgtgacgctgcacccggccgcctcgcaccagtgcacaaacaagtcgcgggcctggcggtccaggtcggtcagggccaggcggcacacgccgcctttgaccgtggcgccgagttgggccaggtccatcagcgattgccacaagcggtcgcggttgatcagcggggcattgctcttgagcggttgcgcaaaactattcatcagcagtctccggtcaggcactcagggccaaatagcggtttttgatggtcggatcagcgcggaaagcggcggcgctgccttcgtagaccacgcggccctgttcgaggacgtaatggcggtcggcgagcttgtcgcagaccatcagattctgttccaccagcagcaccggcaggccatcctccttgaccttgcgcaggatcttcaccaactcgtcgacgatcaccggggccaggccttcggtgggctcgtcaaggatcagcagcttggggtcgttgagcagggcgcgggcgatggcgagcatctgttgctcgccgccagacaaagcatggccggcgtttttgcggcgttccttgaggcgcgggaacatgccgtatacgtcctccatctgccagcggctggttttgcgcacggcaatacgcaggttttcctcaacggtgagcaggcggaaaattccgcgattctccggcaccagcgccaaaccctgacgcgcgatttcaaagatcttctggccgaccaacgcctggccgttgaagtgaatctggccctggcgcgggcagataatcccgaggatgctgcgcagggtggtggtcttgccggcaccgttacggcccagcagcgtgaccagttcgcccgggttgacggtcagcgacacgccttcgagcacgtggctcttgtcgtagtaggaatggatattctcgacgatcagcatcaggcagcctccccaaggtaagcggtgcgcacgcgctcatcggcgcgcacgaactccggtgtgccttcgaccaggatctggccgtggctcatgactgtgatgcgttggctgatggacatgacgatgctcatgttgtgttcgatcaacagcaccgtgtggtcgcggccgaggtcgctgatcagttgggtcatgatcggaatgtcgtcgatgcccatgcccgaagtgggttcgtcgagcatcaacagtttgggtttggagcagatcgacatgcccacttccagcacccgctgctggccgtgggacaactcgccggcgagggtgtcggcgcgggcgctgagttgcaggcgttccagtacctggtcggccatctccaggtgttcgcgcttgctgtccacgcggcgccagaagttgagggcgcgggcgccatcgcggccttgagcggccaggcgcaggttttcgcgcacgctgaggttctggaacaggctggtgagctggaacgagcgcgccatgcccaggccgacgcggccgtgggccggtttgcgcatcaggttcttgccgtcgaaatgaatcgccccggcggtggcctggcgttctccggtgaggcagtgaaacaggctggtcttgcccgcgccgttggggccgatgatggtgtggatggtgccggcttcgaccttgaggttgacgccattgaccgcatggaacgcgccgtaggccaattgcagatttttggtttccagcaggatgctcatagcacttcctccttggccgtgaccgaggttttgcggcggttgcgcacgcgttcgaacagcgatgcgaggccgccccataacccgccgcgcataaagatcaccacgaagatcaggatcaccccgagcagcatcagccagcgcggccacaggtcggaaaggaaatcccccagcagcacgatggaaccggcgcccagcagtgagccgaacagcgagccggtgccgccgacgatggtcatgatcaggatgttctcggacatcgccaggtcgatgttcgacagcggcacaaagtgcagcagcatcgcgtacagcgcgccggcaatcccggtgacggcgccggacagcacaaacaccaggatcttgaagtggcgtgtgtcgtagccgatggccgaggcgcgggtttcattctcacggatcgccatcagcgtgctgccgaacggtgaggcgatcacccggcgtgcgccgatgaagatcagcaggaacagcaccgcgacaaaggcgtagaaggcacgggcgtcgctgagcgacagcagcaccgtttcaccgatacggatttgcgggcgcggcacgctgagcaggccgttgtcgccgccggtccagtcgctgagggtgtaggccacgaagtacgccatttggctgaacgccagggtgagcatcacgaagtagatgccggtgcggcggatcgccagggcgccgaccagcaacgccaggaaaccacccgcgacggcagcgccaatcaaggcgctgaacaggcccagttgcaagtgaatcatcagcagcgccgcgcagtacgcgcccgccccaaagaagatgccttggccgaacgacaacagcccggtgtagcccagcagcaggttgcaggcgagggcggccatggcgaagatcaggatctcggtggccagggtcgccgagggcaatatcagcggcaggccgatcagcaccgccagcacccacagcaacatcgctttggactgggttttggcaaatggcagggggtttttctcgctcatgtcaggctctcccgaacaggccgtaagggcgtaccagaatcaccacggccatcgcgccgtagatcatcaggctcgcgccttggggccagagtgtggtcatcaggctttgcaccacgcccaccagtaaaccgccgaccagcgcaccgctgaacgagcccatgccgccgatcaccaccaccacgaaagccacgccaagaatttccgggccgacaaagggctgggcgccgcgcaacggggcaaacagcaccccggccatgcccgccaggcccacgccgagggcgaaggtcatggaaaacaggcggaaaatatttgtgcccagcagcgacacggtttcggtgctttcactgccggcacgtaccagggcgccgaagcgtgtgcgttccagcagcagccacaggcccagcccgaccaacccggaaaaaccgatcagaaacagacggtagtgggggtacacaaagtcgccgaccaccagcaccccgcgcagcagttgcggcacggcgacgcttttgcccaccgggccccagatcatcacgctggcttcctggatgatcagtgcgatgcccagcgtcaccagaatctggaacatgtgcggcaggtggtaaatccgctggatcaacaatcgctcgatcacccacgccagcgcagccaccaccagcggcgcgatcagcagcgccagccagaagttgccggtcaggctcacggcggtgtagcagatgtaggcgcccagcaggaagaacgcaccgtgggcgaagttgacgaagttgagcagcccgaaaatgatcgtcaggccgaccgcgatcaggaagtagatcatccccagcccaaggccgttgaggatctggaacaggtaaagattcagcatgcagaaaccctcggcaggacgccgcttgcgcggccctgcgctgcaaaattcagggggtcaggcgagcgtgcagcccgtggcttccactggcgggaacgactggccggcactgagcactttggccaggtcgtccttgtcggccatgtcgccggcggccttgccgatcatcaggtagtaatccttgatcacctgatggtcgccggcgcggattgattccttgccggtcgggccttcgaagctcaagccttgcatggccttggcgaccgttgggccgtcgaagctgccggtggaaacgatggtgtcgagcatgactttggtgctgatgtagtcagcggccagcgggtaggtggggtttatgccatatttggcctgggtcagcttgaccagctcacggttgagcgggctgtcgacctggtgccagtactgcgcgccgaggtacacgccttccagcacatcactgcccaactcctggaattgatccaggccggcagaccacaccagcagcactttcatgcgttccttgatgccgaagttcaccgcctggcgcagggtgttggacgactggctgccgaagttgagcagcaccagcacatcgggtttggcggcgatggcgttggtcaggtagccggaaaactcttgctcctgcaaggagtggtagctgttgccgatatgctccaggccgttttccttgagcacatttttggcgccttcaagcagcgcttcgccgaacacgtattgcggggtgatggtgtaccagcgcttggcgtccggcagcagcttgatcagcggcagcatggtttcgcggatcgcgccgtaagtgggcaccgaccaacggaacgtcgcgtggttgcagtctttgccggtcacttcatcggcgccgaccggggtcatgaatacgccaccgaccttgtccacttccttggccaccgccagtgccgacgacgacaaggtgcaaccctggaagaaccgcgcgccgtcctgctggatggcttcctgcaccttgcgcacggccttgccggcgttgccctcggtgtcgatgactttgtagttcagcgggcggccgagcagctgggggtgctgttccacggccaggcgcgaacccatgtcggcaaacttgccgtagctggcaaacgcgccagacatggacttgaggccgtaaaaggtaaagggctcggcggcgagtgccgaacgcacgctcagcgggaggctgagggcggctgcggcggtaagactggctttcaacaacgtacgacgctgcatggggtgactccctggtttagttattggcaggagcggcaagggcgatacggtggagcaagggcctgtgggcaggcctgttattgaattgggtgaagcggtctgacggttggaaccgggtttgtgtgggagctggcttgcctgcgatggcatcgactcggtgtaactggaagaccgaggtgtctgcatcgcaggcaagccagctcccacacaagccagctcccacattggattcgcggtgtccttagcggtggtcgaactccagcaaaaagtgcgggctgacttcaccttccagcgcggtcatgtggtgttcggcatcacacatgtgttcatgcatcaacccgcgcacggcgttttcatccccggcacggaaggcgatcagcaattgcttgtgatagtccaggttggccgcgtcgaactgcttgcgcttgggcttgtaggcttttttcagcaccaccaggtcgcgcagcaggtcgttgagaaactgcgccatgaaactcagcaacggattggggcaggccctggccagcaggttatggaactcaagctcggccaggcgctgttcgcgctggccggcttcgctgtcttccggggcgctgcaaaagtccacgttgtcttgcagggcccggtagtcgtcttcgctcaggcgcccgaggactgacacggccagttctacttcgatgactttgcgcagctggtacacctgctcaccatccaggtgctgaaaatgcaggtagttacgcaaggcacggctggccggctcggtgccggcctggttcaggtaggcgccgccactggggccggtgcgcgtgctcaccaggccttcaacctccagcgctttgagcgcctcacgggctgaccctttggagcactggaagctttccatcagttcgcgttcggtgggcaggcggtcgccgggcttgagggcatcggtgacgatagagcgcttgaccgattcgacaatcacatcggagagcttctggcgtttgcgtcgcaacgggcggctgagcatggtgtgctattgatcctattaatgcggattaatagcacttaataacgattgggcgagagcgtcaacgcagggtgtcgttttcgacgcgaagtggtcgtaaacgcagtgattactcccaactgccccggtcaaggcagcgtgtggacacgggtggctgtttgccgtacaccagaaaatccccgacccattgcttgatacacccactggcgcctgcgccgggctgcgccacctccttgagctgcagcaggtcgacacctgaaacagccggctcgccgcggtcggcgttgaccagcgccatgcgtgcaacgcgctcgggaaacagcgcggcatagcgcccgccaagccgggtggcctgcgcaacgccaaggaagttgatctgcgtgtctcccaattgcctgcgcacaaactccatatcccgcgccgcctgctcgatagcgttgtcttgacccaggtcgcgggcgctgatttcaaccacgtcataacggttggccagcgtgcggtaagccggcgtggcgtacgactcccagcggctgaccagtgagagggcgaaggttatgtcttgaggtttatgcagttcaccggcctggatgaatactacgccctcgcggctgagcgggtgccgcgcgccgacgcgggtcactgccaggcgtacgctgccgcgtgccggggcagcatgatcgcggggcacgctcaccgtgccgcattgggttcggtcaaacacttcagggtccgggcgtggtgtggcaggaagggggcagtccagcagccagtcaatcgcagtgggggcgatcagcggttcggcaaagcccgggcttgcgcacagccaaaggcaggcgcacgccaggcttttcagaaaaacgctggatttcatcagcagagtccgggcaaccgtgtgagaacggctttttaccaaagacccggggtgaagaatgtaggactagtaaacgctttgtgtaagtaaccggagtttcgctgtcaggtgtccggtttccagccgccgcccaaggctttgtacagcgcaatgctggcttgcagccgtgaaagccgcagttgcacatccaggtcttgggctgcgtacagcgtgcgctgggtttccagcaccgtgagcaagtcttcagccccggcctggtagcggctttgcgcaatcccgaacgcggtccgggcctgttgcagttcttcggtctgccattggcgctgctggtccaggcgcgtgatgctgctgagggccttttccacatcggcaaaaccgttgacgatcgcgccgcgatagatctgcagcagttcgtcctggcgggcacgcgccttgtcgcgctcggcggccaggcggccattgttgaagatgggcgcgaccaggccggacgtcaggttgtagaacgggctgcgcagaatgtcttcggccttgtacgagcccgaacccaaggtagcgccgagggtcacggtgggcagcatcgccgcgcgtgccactgtgacatcggcactggcagcggccagttgcgcttcagcctgggccaggtcgggccggcggctcagcagttggctgggcacgccggggccgatgcctggccaggtcagcgcctgaaacggttcgctgcccacttccagcgcctgcacgggctggccgaggagggcggcaagggtgatcagggactcttcggcgacttgctgaatcattggcagttggcgcctctggctggcgaccaggcttttctgttgggccagttccagtggggtggcggagcctgcgtcgtagcgggtctgcaccaggtcgagcacgttgcgtgcattggccaggttcagctcagcgatctgttggcgctggcgggcggcgagggtttgcgcatagcggtcggccacgttgctgagcaaggtcagctccacggtggccctgtcgaactcactggcgcgcagggtttgcacggcgctgtctcgcgcggcgctgcggccaccccagaagtccagctcgtaactggcggtgaggttagcgccgaaactgtcgacggttttttcgctttcggtggcgtccaggtccgagttgccggtaccgcgcagcagcttttcgcggctggcggtgaggttgaatttcacctcgggcaataacggcgcacctgcgatcacggcactggcccgggcctggcgcacccgtgccatggcggcagccacgtcatggctgtcacggcgtgcctggtcaatcaggcggttcaattgcgggctgccaaattgcgtccaccagcgctggttgaccgcctgggcggcgtcccgctcggcgtattgccaggcggcaggcggcgcgatgccagtgtcgaccgcagtgggagtgccggtgcaggcgttgagcaacaggcacaggctgagaagagagagtcgattattcactggtcaacgccttaaccggatcgagccgggcagctttacgggccggcatgaagccgaatacgacgccggtcaccagcgcacagccaaatgcgccgaacaccgccaccagggaaaactgtaccgccacgctggccagcaccaacacgccgcccaccagcagcgcgagcgcgataccgcacaggccgccgaccaccgagagcatcaccgcttcggtgaggaactggcgcaggatgtcgcgctggcgcgcaccggtagccatgcggatgccgatttcgcgggtccgctcgcgcacggtcatcagcatgatgttcatcacgccgataccgcccaccagcagggaaatcgcggcaatcgaccccaacatcaatgacagtgtgttttgcgtgcgcgcctcggcctggatcatcgcggcgctgttggtcagccggtagtcgcgcttgccgttgtgcagcttgagcatgagctggtcgatggcctgttcggcctcatgcaccttgcgcgcatcggcggcggcgatcaccacgtactcggggttataggtgccgaacaggcgcacgctggcggcggtgtaggggatggcgacacggtcgtcgctgtcctcactgccggagcttgagcctttttccgccaacacgccgatgacctggaagggcacgttttcaatcaggatgtactggccgatgggcgtggcgacgttcttgaacagtttttcgcggatgcgatggccgatcaccgcaacggtggcccccgtgcgctcgtcggcctcggtgaagtaactgccctcgaccactggccagttgaagatgtccgggaaattgacgtcgttgccgcccacataggcgaggtagtcgaggttgccaaaacgcaccccggcgtcgttgccattgaccggcatgatgcgcttgacctggggcagtgcggccagggccgcgacatcactgagggtgaccacacccagcggcgtgcgcgggttgggcgaggagccgctgaggtagatgatgttggagccgaacgcgcccatctgcgccatgacctggcgcttgctgccttcgcccaccgccagcatcaccaccactgatgccacgccgatgatgatcccgagcaaggtcagcgcggtgcggaagcgattgatccacatcacgcgccacgccgcttgcacggcgtccagcaactcggccttccatgcgccgttgtgttcggcgccgtcagcgaggcgctggcgcaggtccacggcttgcaaggcgtcgctgttggcggctgccgggacaaaggtgtcttctgcgcacgagtcactgatgatcaggccgtcgcgaatctcgatgatgcggttggctcgcgcggccacttcacggtcgtgggtaatcaggatgaccacatggccctggctggccagttcatccagcaaggtcatgacctcggcgccgctgtggctgtcgagggcgcctgtaggttcgtcggcgaggatgatatggccgccgttcatcagcgcccgggcaatcgacacgcgttgctgctggcctccggagagctggtgcgggcggttgccggtgcgctcggccagccccaggcgggtgagcagggcgttggcgcgggcatgccgttcggccgcgctgatgccggcatagatggcgggcatctcgacgttttccagggctgagcccgagggaatcaggtgatagccctggaacacaaagccaaaggcttcgcggcgcaaccaggccagctcgtcgctgcccaggtcggcgacattttcaccggcgaacaggtactcgccgacggtggggcggtcgaggcagccgaggatgttcatcagcgtggatttaccggaaccggaggcgccgacaatggcgacgaattccccggcatgaatcgacaggtcgatcccgcgcaatacgtcgacttgcgggctgtcgccgccgccgtaggatttgcggatgtgcttgagttcgatcaggggcgtggccaactcaacccccactgctattggcggggccaatcagcaggtggtcgccttcattgaggccgcccagcacttcgacccgcaggcgatcactgatgcccaaacgtacttcacgctcctcgatggcaccgtttttcgccacgacccgggcaatcgacgtgtcgttgcccgcgccgttcaacaacgcagcgactggcgcggtgagggcatccttgacctggcctgcaacgaaaaacacctgggtggtcatttccgccatcaacgcgtggtcggcgttgtccacatcgagcagtacggtgtacagcaccacgcggccgctcccgcttttactggtgctgttggggctgccaccgccctggcttgtttcattgagcggcttgggcgggatgggcagaatctggcgcaccgtgctggtccagcgccggttgccgccgctcaaggtagtgaaataggcggtcatgccgggtttgacttggccgatgtcggcttcggaaacttccgcccacacggtcatgggcgacagcttggcgatgcgcaggatcagcggcgtctgttgctgggcgttgagggtctggccgacgcgcgcgtctaccgcgacaacggtgccgtccatcggcgcaaaaatacgcgtgtagcccaattcggcttcgtcgctgcgcaggctggcccgggcctgacggatctgcgcctggaacatgtcgacccgcgcctgggtggcgctcaactccgccttggcggtttgcacgtcctcttcgcgggtggcgttgccggcggcgagacgctgctggcgctggtacttctggcgcgccagttcgtgctgggctttctgctcttgcaattgagcctgcaggttttcaatcgcatagcggctggcatcgagcttggccttttgtgtcgacgggtcgatctccaccagtaactggccttccttgacctgatcaccggcctcgacgtgaatcttctggatctgcccggacgcctgcgcacccacgtccacataacgacgcggttgcagggtgcccagggcggtgacgctgctttctatattgccgcgcgtcacggtgacagtggcgagggcgtcgcgccccgccggctgcatctgccaggcggcgacggcgatcacgggaatcaggcacgccaccacaagcagggcgcgtcgggcaggtcgagggcgtttcatgcttaggttccagccgggaaagatcggagcgcagttgcgctgagctgacagttaaacgaggaaattgcttggagatttaggccgttacacaatcggtaacagctgcgcggaataaaaaaatcgacggttggtgcgagatttctttaaaagtagatgagaattattataaattgcacgcattcaaactgccatcatcggtaggctgcacttttagcaatcagggatcggatgccgtctgcccggacggtcgggggtcatgttggaaaactactatcgcgagctggtgtgtttcctcaacgccaagctgggcaaccgtcaggtggccgaggatgtggtgcatgacgcctacgtgcgggtgctggagcgttccagcgacacgccgatcgagcagccccgcgcatttttgtaccgcaccgcgctgaacctggtgatcgacggccatcggcgcaacgctctgcgccaggccgaaccgttggaagtgctggacagcgaagggcgtttcgccaacggctcgccccacgccacccacgatcaagggcaacgcctggagctgctggaacgggcattggcggagctgccggccgcttgtcgcgacagcttcctgctgcgcaagctcgatggcctgagccacctgcatatcgccgagcgcctgggcatttcccgcagtatggtggaaaaacacattgtgaatgccatgaagcattgccgggtgcgcatgcgcgagtgggatgcgcactgagcgtccattggctaaattttatttcattgtcctcgtttcctatcaacacatgacctgttgatcagccttcaggtctcgaaggtattcccgccccaccgccacggggtttatccagaggacactggaatgacacaggcaattgcttcgcccgcggttcatgacctgatcggtatcggtttcggcccttcgaacctggcgctggccatcgcgctgcaggaacgcgagaaaacccagggcaagctggacgcgctgtttctcgacaagcaggccgactaccgctggcacggcaataccctggtcacccagagcgagttgcagatttccttcctcaaggacctggtgacgctgcgcaaccccaccagcccttactcctttgtcaactacctcaaggcccacgaccgtctggtggatttcatcaacctgggcaccttttacccgtgccgcatggagtacaacgactacctgcgctgggtggcggggcaatttcaggcccagggccgttatggcgaggaagtgctggccatcgagccgatcctgcatcagcaacaggtcgaggctctgcgcgtgatttcccgtgatgcccagggcgagcaacatgtgcgcaccacccgttcggtggtggtcagcgccggcggtacgccgcgtgtgccggctgcgttcaaggggctcaaggatgacaaccgcgtgttccatcactctcaataccttgcgcgcatggcccagcagccatgcgtggagggcaaaccgatgcgcattgcaatcatcggtggcggccagagcgcggccgaagccttcatcgacctgaacgacagtttcccgtcggtgcaggtcgacatgatcctgcgcggctcggcattgaaaccggccgatgacagcccgttcgtcaatgaagtgttctcgccggcctttaccgacctggtgttccagcaagtcggcgccgagcgcgagcgcctggtggccgagtatcagaacaccaactattcggtggtggacctggacctgatcgaacgcatctatggcatcttctaccgccagaaagtctccggcatcgcccgccatgccttccgtaccatgaccgtggtcgataaagccgccgccggcccgctgggcatcgagttgaccctgcgcaacaacgccaatggcgaaaccacactgggccattacgatgccgtcgtgctggccaccggctacgagcgccagatgcaccgcgaattgctggcgccgctggatgactacatgggtgactttgaagtcagccgtgattaccgcatcgtcaccgacgagcgttgcaaggcgggtatttatattcaggggttcagccaggccagccatggcttgagtgacaccttgttgtcgatcctgccgatccgcgccgatgagattgccgcatcgttgtatgagcatgatcgccatcgtggtcacgggcgttcggtgcaggatctgctgttggccaccgcaagctgacaggctgtacttgtgacacgcagtggctgctgatactgtacaaaaaaccagtatcggtagccctccatgcagttgatcgaaaaactcagcatcctcgccgatgccgccaagtacgacgcttcctgcgccagcagcggcgcgcccaagcgcagctcggagggcaaggcggggctgggttctaccgatggcatgggtatttgccacagctacacgcctgacgggcgttgcgtgtcgttgctcaaggtgctgctcaccaacttctgtctgtacgactgccaatactgcgtcaaccgccgttccagcgacgtgccccgcgcacgtttcagcccggaggaggtggtcacgcttaccctggatttctaccggcgcaattgcgtcagcgggctgtttctcagttccggcatcatccgttcggccgactacaccatggaacaattggtccgggtcgccaaactgctgcgcgaagagcatgattttcgcggctacattcacctcaagaccattcccgaagcggacccggcgttgatcgccgaggccgggcgttatgccgaccggctgagcgtgaatatcgagctgcccaccgatgccagcctgcagacgcttgcacccgagaagcagattgtctcgatcaagcaagcgatgcagaccatctacaccggtgagcagacggtattgaacgagccgcgtgcgccgcgttttgccccggccgggcagagcacgcagatgatcgtcggcgccgatgacacagatgacagcaccattctgcacggcgccgaggcgttgtacggtaactacaaactgcgccgcgtgtattactcggcgttcagccccatccccaacagcccgaaaagcgtgccgttggcggcaccacccttgatgcgcgagcaccgtttgtatcaggcggatttcctgctgcgcagctacggtttcagtgccaacgaactgtttgaaggcccgggccatctggcgttggatatcgaccccaagctggcctgggcgctggagcatcgcgaggtgtttccgctggacctgaaccgcgccgaacccactctgatcgcgcgtatcccgggcatcggcctgcgcaccacccagcgtttggtcgacctgcgccgcgaacgcaagatccgttttgaagacctggcgcgcatgcgttgcgtgctggccaaggccaagccgtttttcatcaccagcgactaccacccgcagcaggcggaaagctccagcgtgttgctgcgtgaacaattgcgcgaccgcccggcgcctcagcaaatggggctgtggggatgatcagcctggaatgcgacaacctgttcggcacctggcgcgagcaggcgcgctggctgctcagccatcaggtggatcccagccaggtcagctggggcgaggccgaagtggcggacctgtttgccaccgatgagccgattcccgaagggctcggcccgttccaggcacggattcccaaggccttgctggagttgctggagtccgccgcctgttaccacggcgatcagcgctggagcctgttgtatgaagtgttgtggcgcgtcagccatggcgaccgtacggcgatgctggcaggcgacaagctgggcagcgagttgcagcgcaggatcaagcaggtgagccgtgaagctcatcacttgcacgcatttgtgcgatttattgccttaccggccgaggccgggcccgaactgccggagtatgtggcctggcatgaaccggcccacgatattttgaagtctgccagccagcatttcgtggggcgcatggggcgccatcgctggatgatcgccacgccactggacggggtgtattacgacggcgagcagttgatccacagacgcgagtgccccgaggcgtggcggcaactggcacagaatgtggaagacccgcacagcgccatgtggctgacctattacagccatatcttcaacccggcgcggttgaaccccaaggtcatggaagggcatttgcccagccggttctggaagaacttgccggagggcaagttgatacccggcttgatcagcgaggcgcggactggcaagcagaaggatgggcaggcgaagttggtaggggctcggcccggtaaaagaattgctaaccctgtcaatgtgggagctggcttgcctgcgatggcgccgggtcagattgaacagaattgactgatgcaccgccatcgcaggcaagccagctcccacagggttgtgcggtgtttaggaggtcgggagtcaggccaatgctgtcgcggtgtttttcaccaccgccaactccggatgcgccaccaacttatcaatatgcaactcctcattgttcaaccagctctccgtcagcacccggtaatgctccatatcgcgacagcgcatgcgcaggctgtagtcgaacggcccgctgatcaactggcattcgaacacctgcgggcaggctttgacgcacgcctcgaaggccttctgcgccgagcgcccgctctgattggacaaggccaccaataccagcagcgacaaccccggtgagaccatctgcacatcgatgatcgccccgtagccgcggatcacaccgcgccgttccagcttgcgcacccgttccaggcacggtctgggggtcaggtgtaccagcgacgagagcttttcgtaagtgatacgcccctgatggcgcagcacgtcgatgattgcctcatcgatgcggtccagcacgggggcggaatgagggctggtggccttggtatccatggtgttcacttcaaacagttgaaaaaaggcggcaagcgttacgcgctggcctgacccgccacatggtacggccttccccggttaacgtctgtatgcctggttcaagcgcgctttttttgctgcacggcgggctgtttggccaggcgtgcgaagaggttttttgggtcggcgagtgccggtaccagctccaactcgctgcccacctccagtgcggtcgccacgtccagcacatagcgcagcgccgagtaatcttcgagggcaaaacccaccgaatcgaacagggtgacttggcgtgcattttcgcggcctggtttctggccgttgatcacctgccacaactcggtgaccggggaatcctcaggcatgtgctggatttcaccttcgatacggctttgcggttcgtattcgacgatcacacgggcacgctcgacgatgcgccggtccaactcggttttgcccgggcagtcgccgccgacggcattgaggtgcatgccgggttcgatcatgtcgtcggtcaggatcgtcgcatacgccttgtcggcggtgacggtggtcacgatatcagcgcctttgacggcctcggccacgctgctggccagaatcacctttatcgccgggaaggccttgaggttggcggccagcttggcggtggcattggcgtcgatgtcaaacaggcggatttctgtgatacccagcaggatgtggaaagccaacgcctggaattcactctgcgaaccattgccgatcaatgccatgctgcggctgtcgccgcgcgccaggtagcgcgccaccaaggccgaggtagccgcggtgcgaatggcagtggtcagggtcatttctgccagcaggacaggcctgccagtgtccacatcgcccagtgcgccgaaggccatgacggtgagcatgcccgcctgggtgttcttcggatggccgttgacgtatttgaaggcatacagcgacgcgtcggacactggcatcaactcgatcacaccttgcgccgagtggttagccaggcgtgcgcacttgtcgaaatcctgccagcgcaggtagtcggcacggatgtactcggccatttcggtgatgcaggtttgcaggcctttttgcgaaaccaggtagctcaggtcattgacgtcgatatagcgggtcacggggttgctcctgattgttcgaagacggccagcgctttctgctgcgtgcaaagcgagagggcgggtggggctgtacggctattgtctgggttattgcgctgggatcccggctgaaacagagggcttgctcagccgggaaagctgaaatgtggggtgtgacagccgaatcggctgtctgctctgaagtgcgatcacgctgtgggcgcgggctggcctgcgaagcggtgtttactgacagaccgctatcgcaggcaagccagctcccacattagtatggtggcggtcgaaatacctgagccaagaaggagagtgcatgtccaccgccgttcgtctcgcccaaaccgccgatgccgagggcatcagccaagtcatcctggcggccttgcacagcagcaatgcgcgggattacccgccggaggtgatcgcccgtgtggcgagcagttttacgccggacgcggtgttggggttgctcaagcgccggttggtgctggtggcggtgcaggatcaagtgatcgtggctacggccgccctggatggcacggtggtacgttcggtgttcgtcaacccggcgttgcaggggcaggggattggccggttgttgatgatcgagatcgaattgcgcgcccgtgaagcgggagtgacggtcttgagcgtaccgtcttcgctgacggccgagcctttctacacaaagcttgggttcaatacagtgcgcgacgtttaccacggcaatgagcgcacgttggtgatggagaaagccttattgtcccggcatcccatcggcgtgtatcgcgatcgtcagcatcgggcgcaagtggtcgccttgtggcagcaggcgtttggctatgatacggcgcacaacctgcccaccctggcgattgacaagaagctggccgtcaacgacgggctgttctttgtggcgacggataagaaagccgtgatcggtacccttctcgccggttacgacgggcatcgaggttggctgtactcggtggcggtgcacgccgattaccggcgtcagggcctgggcgcttcactggtgcggcacgccgaacaggcgttgaccgccttgggctgcatgaagatcaacctgcagatcaccggcggcaatgatgcggtggtggggttctatgaggcgttggggtatggcgaggagccgaggatcagcatgggcaagaagattacccagaacatccccaaatcttgaaaacaccacaaaaaaatgtgggagctggcttgccagctcccacagggggcttgcagtgtggcggtcagaccttgacgatccagcctgctggcgcttcaacgtcaccggtctgcacaccggtcagctctttgtagagctgctgggtgatcgggccgacttcggtctcgctgtggaacacgtgcagctggccgttgtactggatgccgccgattggcgagatcaccgcagcggtaccgcaagcgccggcttccttgaactggcccagcttgtcgatgaacacttcgccctcgaccacttcaaggcccagacgggtcttggccagttcgatcagcgacaggcgggtgatgcctggcagcaccgaaggcgacttcggcgtgatgaacttattgtcgtgggtgatcccgaagaagttggccgaaccgacttcttcgattttcgagtgggtcatcgggtccaggtagatcgcgtcggcgaagccggatttcttggcttccgaacccggcatcaggctggcggcgtagttgccaccgaccttggcggcaccggtgccttgtggcgcggcgcggtcgaaggtggaaatctggaagttgtggggcaccaggccgcccttgaaataggcgccaaccggaatcgcgaacaccgagaagatgaactccggtgcggtacgcacgccgatgttgtcaccggtgccgatcacgaacgggcgcaggtacagcgcgccgccactgccgtacggcgggatgaagcgctcgttggccgcgaccacttttttgcaggcttcgatgaagtcttcggtcgacacgtgcggcatcagcaggcgggcgcagctgcgttgcatgcgcgcggcgttctggtccgggcggaacaggttgatcgaaccgtccttgcagcggtaggccttgaggccttcgaagcactgctggccatagtgcagggcagtggagccctcgctgatgtgcagcacgttgtcgtcggtcagggtgccttcttgccactcgccgtttttccagacctggagaaaccgcttgtcggtcttgatgtagtcaaaacccagcttgtcccaattgatgctttcgttacccatgacaccctctatctctggtcaaccgcctggtcgaaggcaggcttgtcggtttttttctggatgggcgcaacaatacttcattcttggccggtgtgggagcgggtggggcggccgttcagcatctgtagtggctgatctaccgctatcgcaggcaagccagctcccacatttggaatgcattctcctgtgggagccgggcttgcccgtgatggccgcaccgctgttttacagatgcagcgcgtggcccaaagcccgtaacgcggcttccagtaccgcctcgccgagcgtcgggtgggcatggatggtgcccgccacatcttccagccttgaccccatttccaggctcaagccgaaggcggtggacagctccgagaccccgacacccacggcttgccagccgacaatcaggtggttgtcacgccgggctaccacgcgcacgaagccggttttcgattccagtgtcatcgcccggccattggccgcgaacgggaagctcgccaccacgcagtccaggccagcggccttggcttcgtccggggttttgccgaccaccaccacttccgggtcggtaaagcacaccgccgggatcgccgccgggttgaattcgcgggtttcaccgctgatcagttcggccaccatttcgccctgggccatggcgcggtgagccagcatcggctcgccactcaagtcgccaatggcgtacacattgcgcatgctggtctggcagcggctgtcgattttgatcgccgagccattcatttccaggttcagcgcttcgaggttccagccttgggtgttgggtttgcgccccacggccaccaacacctgatcggtttccagcgacaaggtgtcaccgttggggtcacgcacttgtaggcagttgttctcgaagccggtcacgctgtgcttgaggtacagcttcacgcccagttgcttgagggattccgccacgggcagcgtcagttcaccgtcgtaggcaggcagaatgcgctcctgcgcctcgaccacactgacctcggcgcccagtttgcggtaggcgatgcccaactccaggccgatgtaaccgccccccaccacaatcaggcgcttgggcacgcttttcggcgccagggcttcggtggaggagatgatcggcccgccaatcggcagcatcggcaggctgacgcttttcgagcccgtggccagcagcaggtgctcgcactggatgcgttggtcaccgacgtcgacggtcttgccgtccaccacggtggcccagccgtggatgacctgcaccttgtgtttcttcagcaaggcggcgacacccgtggtcaggcgatcaacgatgccgtctttccattccacgcttttgcggatgtccagcgtcggcacatccacttcgatgcccagcttcgagccttggctgtggtgtacggtttgctggaattgctcggcgacgtgaatcaaggctttggacggaatgcagccaatgttcaggcaagtgccgcccagcgcctggccttccaccaggatggtcgcaatgcccagttggccggcacgaatcgccgccacatacccgccagggccgccgccgataatcagcagtttggtattcagggtttgcatggcttactccaggaacaggctggcgggttgttcgagcaggccgcgaatggcctggatgaattgcgccgcgtccatgccatcgaccacgcggtgatcgaaggaactggagaggttcatcatcttgcgcaccacgatctggcccttgatcaccatgggccgttcgacaatgcggttgacgccgacgatggccacttccggcaggttcagcaccggtgtgctgacgatgccgcccagggcgcccaggctggtcagtgtgatggtcgagcctgacagctcgtcgcggctggccttgccattgcgcgcggcggtagccaggcgtgcgatttcttcggcattaccccacaggctgcgggcttcggcgtgacgcaccaccggcaccatcaggcccacgtcgctctgcgtggcgacgcccacgtgcaccgcccccaggcgggtgatgacctgggcttcgtcgtcataacgtgcattgatctgcgggaagtcgcgcaacgccacgaccatggcgcgcacgataaatggcagcagggtcagcttgccacgcgtggcaccgtgcttctcgttgaggtgcacgcgcagctcgtcgagcgcggtgacgtcgatttcttccacataactgaagtgcgcagcgcggcgggtggcgtcctgcatgcgctgggcgatcttgcggcgcatgccgatcaccgggatttgttcttcggtgttgcgttcggcgtacggattgccagccactgacgactttgtcgtgccttgttgcaggtaggcgtcgaggtcttcgtgcaggattcgcccggcggggccggaaccctgtaccagacgcaactgaatgccggcgtccaatgcgtgtttgcgcacggccggggaggccagcgggcgttcgtcggcgtcacgtgccaccggcgcctgggctgcgataacgggcgcaggtttgctttcaaccgccaccggcgcaggcttggcttcaaccaccggtgcggccttcggcgcttccttcaccacgggggcttccttggcgttgcccgcgccttccacttcaatgctgatcaaaatgctgcccacagccatgacctcacccggctcgccgccgagggaaatcactttgccgtgcaccggcgaaggaatgtccaccatcgccttgtcggtcatcacatccgccagcacctggtcttcaaccaccaggtcaccgaccttcacatgccacaccgacagttcaacttccgcgatgccttcgccaatgtccggcatcttgataacgtgcgtgcccattcagacctccatgacccgtttcaacgccgcgcccactcgggacggccctgggaaatacgcccactcctgcgcgtgcgggtagggagtgtcccaaccggtgacgcgttcgatcggcgcttccaggtggtggaagcaatgctcctgcaccagcgacaccaactcggcaccaaaaccgcaggtgcgcgtggcttcgtgcaccaccacgcaacggccggttttcttcacggacttgacgatggtttccaggtccagcggccacaggctgcgcaggtcgatgacctcggcgtcgatgccggtttcttcagcggcgacttgcgacacatacacggtggtgccgtaggtcagcacggtgacggcagagcccgggcgcacgatggcggccacgtccagcggcacggtgtagtaaccgtccggtacttgggcttgggggtgtttcgaccacggggttaccgggcggtcgtggtggccgtcgaacgggccgttgtacaggcgtttgggctcgaggaagatcaccgggtcatcgttttcgatggaggcgatcagcaggcccttggcgtcataggggttggatggcatcaccgtgcgcaggccgcagacttgggtgaacaccgcctcgatgctctggctgtgggtctggccgccatagatgccgccgccgcagggcatgcgcatggtcaacggtgccgtgaactggccggccgagcgataacgcaggcgcgccgcttcggagatgatctggtcggtggcggggtacacgtagtcggcaaactggatctcggcgaccggacgcaggccgtaggcccccatgcccaccgcgacgccgacgatgccgctttccgagatcggggcgtcgaacacccgcgagctgccgtatttggtctgcaagccttcggtgcaacgaaacacgccgccgaagtaacccacgtcctggccgaacaccaccacgttgtcatcacgttcaagcatcacatccatggccgagcgcagggcctggatcatggtcatggtggtggtggtcatggcggtttccacttcaatactgttgttgtgatcgttcatgtcagatccccaactcctgacgctggcgcttcaagtgctccggcatctctttataaacgtcttcgaacatggtcgcggcgcttggaatctggccgccggcgagggtgccgaaggtttcagcttctttctgggccgcgatcacttcggcttcaagttcggcactgaccgccacgtgttcctcttcggaccactggccaatctggatcaggtgctgcttgaggcgggcaatcgggtcgcccagagggaagtggctccagtcatcggccgggcgatatttggacggatcatcggaggtggaatgcggaccagcgcggtaagtgacccattcgatcagggtcgggcccaggttgcggcgcgcacgctcggccgcccaggcggaggcggcgtacaccgcgatgaagtcgttgccgtccacgcgcagggaggcgatgccgcaaccgacgccgcgtccggcgaaagtggtggcttcaccgccggcaatggcctggaaggtggagatggcccactggttgttgaccacgttgaggatcaccggcgcgcggtacacgtgggcgaaggtgagggcggtgtggaaatcggattcggcggtagcgccgtcgccgatccaggccgaagcgatcttggtatcgcccttgatggccgaggccatgccccagcccacgccttgtacgaattgggtggcgaggttgccggaaatggtgaagaaaccggcgtcttttaccgaatacatgatcggcaactggcggcccttgagcgggtcgcgctcgttggacagcagttggcagatcaggtccaccagcggcacgtcgcgggccatcaggatgctttgctggcggtaggtgggaaagcacatgtcgtcgatgttcaaggccagggcctgggcgctgccgatggcttcttcgccaaggctttgcatgtagaacgacatttttttctgacgttgggcgaccaccatgcggttgtcgaagatccgcgtcttgagcatggcacgcatgcctttacgcatgatctcgaccgagacgccttcagcccatgggccgagggcctggcccttgtcgtcgagcacgcggatcaggcccttggccaggtcagcggtgtcggcgggttctacgtcgatggcgggtttgcgcacggtgcctgcgtcagtcaggcgcaggtaggtaaagtcggttttgcagccggggcggcctgagggttcaggcacgtgcaggcgcagtggttcgtactgctgggtcatggctttctacgctctatcttgtgaatttcttgtagtgggcgcgctagctgacagtccgtctccgggtaggagaaatcttgtcctacaacaatcataggcggggcgtagaagaatatttatctgtgtttcattgcgctgtggatcatttgcggataaaaaaactgcataaccataataaacaggtgattttgtctcatgcgcaaactggaccgtaccgatatcggcattctcaacgctctgcaggagaacgcccgcattaccaatgctgacctagcccgctcggtcaacctgtcgcccacgccgtgtttcaaccgggtgaaggcaatggaagaactgggcttgattcgcgaccaggtcacgctgctcgacgccgatttgctggggctgcacgtcaacgtgttcattcacgtgagcctggaaaagcagaacgaactggcgctgcagcagtttgaaggtgcgattgccgaccggccggaagtgatggagtgctacctgatggcgggtgacccggactacttgatccgcgtgctggtgccgacgattcagtcgctggagcgcttcatgatggactttttgaccaaggtgccgggggtggcgaacattcggtcgagctttgcgctcaagcaggtgcgctataaaaccgcgctgccgttgcccgccaatggcatcaacctgggttcctgaatccatccgattcaaatgtgggagctggcttgcctgcgatagcggtgggtcagctggcacatttgctactgatgtaccgctatcgcaggcaagccagctcccacagggttttgcatttcagagttggttgagtgggatcttcaggtaagtcacgccattgtcttccgccggcggcatgtgccccgcccgcacattcacctgaatcgccggcagcagcaacgtcggcattcccagcccggcatcccgggtggtgcgcatctggacaaacgccgcctcatccaccccgtcatgcacatggatattgcccgcgcgctgctcggccaccgtggtcaggcatttggcctcgcggccttcgggcgggtagtcgtggcacacgtacagttcggtttccagcgggaaggccagcaatttgcgcatcgacgcatacagctgccgcgcatcgccgccgggaaaatcgcagcgggcggtgcccacgtcaggcatgaacaaggtgtcgccgaccagaatcaaccgaccatcgatcaggtaggccatgtcggcaggggtgtggccgggcacgtgcagcgcttgtgccttgaggtctccgatatgaaagatctcatccggcgcgaacaggtgatcgaattgcgagccatccacgcgaaacgccggctccaggttgaacaggtttttgaaaacaccctgcaccttgctgatggactggccgatggcgatcttgccgcccagcgcctggcgcaggtacggcgcggcagacaagtggtcggcatgggcgtgggtttccagcagccattgcacctgcaaaccctgttcacgcacaaacgctatgaccttatccgccccgtcagtcgcggtgcgcccggacgcggggtcgtaattgagcactgaatcgacaatggcgcacgggccgccagcatgttcataaatgacgtaggtgaaggtcgacgatgcctcgtccagaaaagcttgaatcaacgctggcatggcggctgtacctgctgaggaataaaggtgaagaaaaaagtggttacaatcagtttacgtttacacataatgttttgagcttaagtgacacaaaggacccgaagcaaatggaatctactctgagtgagggcgaagtcgcccaattgcgggcgtcggcgtccaaggcctgctccttgctcaaggcactggccaatgaagaccgtttgttgatcctctgccagttgacccagggcgagcgcaatgtcggcgagctggaagccctgaccggtgtgcgccagcccacattgtcccaacagttgggcatcctgcgggacgaagggttggtcgccacccgtcgggaaggtaagtacatcttctacgggctggccagccacgaagtgattcaagtgatgaaaaccctgtccgggctgtactgcggcgcggtcatcaaaagctgggcgtgacgccatccggcagcgacccttgtgtgcaccctaagaaaggcgattgaccatgaacgaccaacactggggcccaaccatcagtggcgatatcgtcgtcatcggcggcggttcggcgggcatcggcctgctggccagcctgctcaagcgcgacccgcacctgaacatcaccctgatcgaaccgagtgagtaccactgctaccagccggcctggacattggtagggggcggtgcctacgacttgaaaaagacccggcgaccgctggcggacgtgctgcccaatggcgtgacctgggtgcaggccgccgtcaccgagttgctgcccgacgagcaaaccctggtgctcgacagcggccagcgcatcagttggaacaaccttatcgtctgccccggtctgcgcctggcctgggagaaaatcgaagggctgcaagacacccttgggcagcacggcgtcacgtccaactacagctaccagcacgccgcctacacctggcaactggtgcagcagctcaagggcggcaaagcgatcttcacccagccggccatgccgatcaaatgtgcgggcgcgccgcagaaagccctctacctgtcctgtgatcactggctcaaacagggccatctgaacaacctcaatgtggagttcaatctggctggcgctgcgctgtttggcgtgccgacctttgtgccgccgttgatgaaatacatcgagaagtacaacgcgcacctggcgttcaattccaacctgatcaaggttgacggcccggcgcgcaaagcgtggttcgaggtgaaggacgccgatggcaacgtcgcagtcgaggaaaaaaccttcgacctgctgcacgtcgttccaccccaggtttccccggactttatccgccaaagcccgctggccgacgccgccggctggtgtgaggtgaacccccacagcctgcaacacctgcgttacccgcacatctttggcctgggtgacgtgtgcggcaccaccaacgccaaaaccgctgccgccgtgcgcaagcaaatcgtggtggtcgccgaaaacctgctcgccctgcgcaaacacgcgcctttgccgctcaagtacgacggctacggttcctgcccgctgaccgtggagaagggcaaggtggtgctggccgagttcggctatggcggcaagttgctgccaacgttccccctcgacccgacccgggcgcggcgttcgatgtggtttctgaaagccacgttgctgccgtggttctattggaacggcatgctcaagggccgcgagtggctgacccgcctgagcaaggtggactgaatgttactggccagtctgttgggattgttgatgggcctcgtcatgggcctgactggcgcgggcggcggtatcctgggggtgccggcgctggtgctggggctgggcttgagcatgacccaggccgcgccggtgtcattgctcgcggtgggggcggcggcggcagtcggcgcgattgacggcttgcgccacggcctggtgcgctatcgcgccgcgttgttgatcgcgctgctgggggcgttgttctcgccgctgggggtgtatttcgcccaccagttgccggaaaaactgctgatggggctgttcagcgcgttgatggtgctggtggcgtggcgcatgttgcagcgcgaaaaagtcgaagccgggccgagtgatcacggcgccgcgtcctggggccagaagaactgcatgctcaaccagcagacagggcgcctggcctggaccgccaaatgcagtgccactctggccgcgttgggcgcggtgacgggtgcggtgtcgggcctgctcggcgtgggcggtggttttctgatcgtgccggcattcaagcaactcaccgatgtgcagatgcgtggcattgtcgccacctcgttgatggtgatcagcctgatttcgctgatcggcgtggtcggtgcgctgcaggccggtgtgcgcatcgagccgatgggctgggtgttcattggcgcgagcattgccggcatgctggccggccggcgcctgtgcgcacaggttcgtgcgcgaaccttgcaagtcgggtttgccagcctgtgcgtgttggtggccgctggcatgttgctgcgggcgctggcctgaagcggcaactgtgtcggtaaagtaacggcgctgaaatatttttccctggggcgcatacaaatgcgtttgggcaaggcaaaatcgcgcctgaattgatggcacggtgccattttgagcctccagggacgatttgctctatgaaccgcattttcagtgtgatctggaatcacagccttaacgcatgggtagttgcgagcgaaaacgctagccgacagggcaagcgcggcactgtcggcgccatttcaaacactgagaatacgcagggtaaaggccgcatgcagcggctgtcggtggccatcgcgctgacgctcggcggcgggttgctggcgtccatgccggccctggcggtggacttgcccagcggtggcaaagtggtactcggcaacggccagatcctcacgcctgaccagcagaaaatgatcattaaccagtcctcgcaaaagctcgccattgactggcagagcttcaatatcggcgcggacaagtcagtcaccttcgtgcagccgggcaaggattcggtcgcgttgaaccgtgtggtcggcagtgacggttcgaagatcatgggccagttgaatgccaacggtcaggtgttcctggtcaaccccaacggcgtgttgttcggtaaaggcgcgtcggtggatgtcggcgggttggtggcctcgaccctggatatctccaacaaggattttgcggcaggcaactaccagttcaaggggcagggcgaagccggcaatgctgctgtggtcaaccagggaacacttaaggccggtgatggcggcgccgtcgcgttgctcggcggtacggtcagcaacgaaggggtgattgtggcccggcaaggcagcgtcgccttggccgcaggcaataaaatcagcctggactttgtgggcgacggcttgctgaatgtgcaagtggacgaagccaccaagaatgccttggtgcagaacaaacaactgattcaggccgacggcggccaagtgatcatgaccgccaaggccggcgacgcgctgctgcaaacggtggtcaacaacaccgggatcattgaggctcgcaccttgggcgagaagggcggcaagatcgtcctgctcggcggcttcgagggcggcaccgtgcaagtcgccggcaccctggatgcctcggcccccacgggtaatggtggctttatcgagacctccggcgctcatgtgaaagtcgccgattcggcacagatcagcaccgccgcctccaggggcaagaccggcacctggcgggtagacccgacggatttcaccattgccgccagcggtggcgacatgtccggcgccaccgtcacccgcaacctgcagagcaccaacgtgcagatcgagagtgacgccgggagcgggcaggggctgggcgatatccacgtcaatgacagcattacgtggagcgccaacacgctgacgttcacggcgcaaaacaccatcaatatcaaccgcgaactgttcggctccggcagcgccaggctggtcctgcaatatggccagggtacgccggcggcgggcaataccgccaaagtgaacgtcaaggccccggtgaacctggcggccggccagcattacagcacgaagcaagggcgcgatggcgctcaggtcgactacaccgtcatcacagacctgggcgcggccggcagcaccagtggcgctgatttgcaagggatcaacggcgcgctcaatggccactttgtgctgggctccaacattgatgccggtgctaccagcggctggaacggcggggcaggtttcgatcccctgggcggtattgcggcgttcaccggcgtcctcgagggcaacgggcactttatcaaggacctcaccctgaaccgtccgggccagaatggtacggggctgttcggtgccatcggcagtaccgggcaggtcggcaacctggggctcaacggtggcagcgtcaatggcggtgcgctcacgggggccttggcaggttccagtgcgggcacgctgagcaatgtcttttccagcgcggcggtctcgggttcatccggcgtgggcggtttggtcggcgagttgtccgccggcggcaccattcgcgatgcctacgccagtggcacagtgaacgccagccagaaccaggcgggtggcctggtggggaatctggccggtggcctgatcgacaagagctatgccagtggtgccgtcaccgcgacccaaggcacagtgggcgggctggcgggcggcaacgccaacggccgaatcaccaacagtttctggaacatcaccggcaccgggttgagcgttggtacaccgaacgcagaggcgggcgcgaccgggctgacagatgaccaggcccacacccgtgccacctttgccaatgccggttgggacatgaatggcacgtgggtggtctacgacggtatttccggcccgtacctgcgcaacttcatgacgcaactgacctataccgccaacagcgcggctaaaacatacgatggccaagcctatgccggcggctacagcgcttcggcgcaaggcgattcacggctggtcggcaatgtggtggtgggcggcacgggggccggtgcaatagacgccggcgactatagtctgcaactgagcggcctggcctccactggcgggcagtatggctattcgatcaactacgtcgatggccggctttcagtgggcaaggcgccgctgagccaggtcggtgcgacggtggctgataaggtgtacgacggcacgaccaccgcgtcggtgaacgatgctgttctcaatggcgtgatggcccgcgacgttggccgcttgacgaccaccgggcagttcagcagcaagaacgtcggcaccggcatcggcgtgacactggggcttggcggtcaggccgcgagcaattacatcctggggccgtactccctgaacggcaaaatcatgccaaaagatgtgactatcacaaaggtcaatgccgacaaggtttatgacggctctgaagggactgtggtgcacttcgccaccttccagggcctggtgaacggtgagcaattggggttctccggcaacggcatcttcaatgaccgcaacgcgggcctgttcaaacccctggtggttctcaacggcacgctgctcagcaataccggatcagcctccaactatcgccttgtcacgcctgtggggctgacgtcggcgattacgccaaggcctgtgtcggtcagcgggattgcggtcagtgacaaagtgtatgacggcagcacagcgggtaccgtcaacctgaacaatgtgagtttcagtggcaaggtagccggggactcactttcggtgaccaatgccctcgccgtgttcagcgataaaaatgccggcatcggcaagattgcctatgtcgcgggtatcaccttgggcggctgggatgcaggcaactaccagttgaatgtcttgccgacattcgcaacagcaacgatcagccctaaaaacctgacggtgagtggcatcacagccgtcaacaaaacctatgacggtaccctcacggccgacctgaacaccttcaaccccgcctttgccggtgtggtaccgggtgatttgttatggattgccagcgccctgggccgcttcgctgacaagaacgcgggcagcgctaaaaccgtgaacatcagcaacatcagcctcagcggccaggaccgcggtaactatcaggtgctcggcaatgccagcgccagtgcgagcatcttgcccaaggaaataaccgtcaacgccatctccgccgtcaacaaggtctacgacggcacgacgctggcaacgttgaacctgggcactgcgaccattcgtgacaaagtaagaggtgatgacctcgccgtgggcgccgctaccggccacttcaatgacaaaaacgccggcgccagaaacgtcactatcagcggtctttccctgagtggcgcggatgccggtaactattgggtgagcggtgttggcggggccagcgcgtttattacgcccaaagaggtgatcgtcacgggtatcaccgtcaacaacaaggtctatgactcgagcacggccgccagcctcaacctgaccaatgcggcgtttgacggcctggtcgccggggatcagttggcggcaggtttcgcctctggccggttcagcgacaagaatgctggcgtcggcaagaccgtcgatatcagcaacttcaacctgaccggcgccgatgcgcgcaactaccgcgcaagcgtcagagcgacaaccgcagacatcacgcccaaggaagtcaacgtctggggcgtgcgcgctgcggataaagtctacgacgggaccacggcagccaccctggacctttcgggggcgcgggtcgatggcgtggagtggggcgattacgtgtttttgaaggacgccaccggccatttcttcgataagaatgccgaatggttcaagcctgttggcaccagtgactttatccttggaggtctggaggcaggcaattataaagtcggcggcatgatcaccgggatatgggccaatatcacggccaaggtcctgaccgtcagcggtatcaccgctgataacaaggtgtacgacaccaccaccgatgccacgctgaacctggccaatgcgcacatcaacggcctgatcgatggtgagcatctggcggtgaattccgcctacggcttcttcgccaaccaagaggctgagaccggtaaaaccgtgtacatcaacgggatcagcctggccggcagcgatttgcgcaactattcggtcatcccatttgccatcaccacggccgatattgccaaggcggcgttgacggtcagcgtcaacgactcgagcaaactgcagggccagcccaacccggtgtttggggtgacctacaaaggtttcctgggcggggacagtgccgaatgggatttggacggcgacctggccttcagtactgcggccaccggcagttccgctgccggggtgtaccgcgtcagtgcggccggccagtcagccaccaactacgacatcgcctacatcgatggccaattaacggtggccccgcaggtgcccgtccagccgccattgccgcagcaggtccccttggcagaagtcgtcagcacggtgcgcccgctgcataacctgcctgcgccggtgctgccgatcgccccgccagggccacgtcgctccaatgacctttacacccttatcgaccaaggcctgcgcctgccagaaggactctgattcatgcgtttgcgtttaaacccgatcacccttgccttaatgaccgtcgtggcaggggcagcccatggcgccgaacgcgccccggatgccgggcagtcgattcgagagatccagaaccagcctttgaccctgccaccccggcagaccctggaattgaacctgcctgcggcgccagacactcgcgttcaagccagtgggccgaccctgcaggtcaatgcgttcaagctgaccggcaacaccgccattggcagcgacgaattgctgcccctgttggccgacctgcaaaaccggatcgtcagcctcggtgagatccaggcgggcgtagcgcggatcacccagctgtatcgccagaaaggctaccccttggcgcgtgcgtacttgcccgcgcaggaaattgacggtggggtggtcagcgtcgctgtgctggaaggccagtatggccagatcaaactcaacaaccactcccgtgtgcgtgacttcgccctgcgagcgccgctctcggcgctggaacctggcgaagccgtgcgcgccgcgccgctggagcgcagcttgcttgagctgcaacaaacgccgggcgtggctatccagtcgaccttgcaaccgggtacgacggtaggcgccagcgacctggtggtcgacgtgaactctgcgccgctgctctccggccaggtcgacctggataactacggcaaccgcttcaccggcgagtaccgcctgggcggcacactgaacctggccagccctttgggcatcggcgaccaggcgagtgtgcgggtgatgggcagcgatgaagaccaacactactatcgcgccgcctatcagttgccgatcggcccctggtcgacgcaagtgggtgtggcctattcggacatggactaccagttggccaaggacttcgatgacctcgacgccaagggcaatgcgcgcatcgccagtgtgttcgtgcagcagccactgattcgcagccgccagttcagcctgaatgcgcaattgcagtacgaccacaaacacctgcgcgacgacattgacctgtacgactcacagagtaaaaagcagtcgcgggtcgtgaccgcgagcctcgacggcaacctgcgcgacacgctgttgggtggcggcgtcacggccttctccctggcctggagcgagggcagcctcaacctggatggggcgttcgacaagttcttcgacggcctcaccgccaaaaccgccgggcgcttccagaagatcaacccaagcgtggttcgcctgcagcgcctgagtgaccgtttcagcctgtatgggcaagtgcagggccagtgggcgaacggcaacctggactcttccgagaaaatcagcctgggcggtgcaactggggtgcgcgcctaccctcagggcgaggcgtccggcgaccagggttatgtggctaaccttgagctgcgttatgccctgactgaacagtggaacctgctgacctttgtcgatcacggcgcggtgcggctgaacaaggacacttgggcgagcggtgagaaccaccgcagcttgtcggccaccggtgtcggcgccaactggagcctttccggctggcggctgagcaccgtggcggcctggcgcctgggcaatgccgatccgcagagcgatgtggcacgtacgccacgggtatgggcgcaggtcagcaaggcgttctgaccttcagtcaggccggatgaccctcggaaactggcaagatgaactcccctcaggtttactactccctgagtcacggacccaccggcgcaaagcgccggtcatcaaggccatcgaatggacaaatacaccccccacacctggcagccccacgagcgaccgagcctgcccggctcgccgtcgacgccgctgcattccacgcccaggcgctggctgtttgcgctggtcggtgtgctggtggcgatcaccggggggctgggtaacgcgctggtgatcgccaacctgcaatacctgcaaggcgcactcggcgcgaccaccgcggaaatggcctggctgcctgccgcctatgtgatgaccaacgtgtgcatgaacctgctgctggtgaagtttcgccagcagtttggcttgcgcgcgtttaccgaagtgttcctggtgctgtatgcgctggtgaccttcggccatttattcgtcaacgacctcagctcggcgattgcggtacgggcggcccacggcatggtgggtgccgcactgagttcgctgggcttgtactatatgatccaggcattcccggccaaatggcgcttgaaagcgctggtgctggggttgggcacggcgcaactcgccttgccgctggcgcggctgttctccgaggacttgctgcaaatcgccgaatggcgcggcctgtacctgtttgaactgggcatggcgctgatttgcctgggctgcgtgttcctgctcaagttgccgccgggcgatcgcttcaagacgttcgaaaaactcgacttcctgaccttcgccattctcgccaccggtgtggcgctgctctgcgcggtgttgtctttggggcgtatcgactggtggctggaggcgtcgtggatcggtgtcgcgtcagcctgctcgctggtgctgatcatggccgggctggcgattgaacataaccgcgccaacccactgttgatgacgcgttggcttggcagcggtgtgatgatccgtctggcgctggcggtggtgctgattcgcatggtgctgtcggagcaatccaccggcgcggtgggtttcatgcagatgctgaacatgagttaccagcagatgcacaccctctacgtggtgatgctggccggggcgattgccgggctggcggtcagtgcgttgacgatcaaccctgcgcatttgctgatgccgttggtcatctctttggcgttcatggccacgggttcggtgatggacagtttctccagcaacctgacccggccggaaaacctgtatgtcagccagtttctgctgggctttggcggcaccttcttcctcgggccaaccatggtgctgggcacgaaaaacgtgctgaccaacccgcgcaacctggtgagcttttcggtgatgttcggcatctgccagaacctcggcggcctgatcggcgcagccttgctcggcacctttcagatcgtgcgcgagaagtaccattcgagcatgatcgtcgagcacctgaccctgctcgacccgcgtgtggccgcacgcgtgcagagcggcggctcggcctacggcggcatcgtcgccgacccggaactgcgcaacctcatgggcattcgtagcctggccacggcggcgacccgtgaggcgaacgtaatggcctacaacgatgtcttcatgctgatcgcgatcatcgcaatcctgaccatgatctggatcttcatccgcagcctgtggctgatgagcaccacccaggcagcagcccctcctgttcaacccagcggcgtgactcaatgactgaaaccaccaccaccaccaatgccgtcgcctccacccccgaaggcaccaagcccgcaggctcaaccgtgactgagccgcgctctttacgggtgcgcatcatctcctcgctgggctttgccgcgattgccatcgtcggggtgttgatcgtgctgtacgcctggcagttgccgccgttcagcagtgcggtggaaaccaccgaaaacgccttggtgcgcgggcaggtgacgattattggtccgcagttggccggctatgtgtttgaagtgccggtgcaggacttccagtacgtgaaagccggtgacctgctggtgcgtctggatgaccgcatttacaagcagcgcctcgaccaggcgctggcgcaactggcggtgcagaaagccgggttggccaatgtggtgcaacaacgcaacagcgccgaagccaccatcaaactgcgccaggcggcgctggcggacagcgaggcccaggcacgcaagagcacggcggacctgcgccgcaatgaagaactgatcagcgacggttccgtgtccaaacgcgatctggacgtgacccgcgcggcgaacgcccagaccatcgcggcagtggcccaggcccaggccagcctggaaattgcgcggcaggatctgcagacggtcatcgtcaaccgcggctcactggaagcggcggtggcgaatgccgatgcggcggtggagctggcgcggatcgacctgtccaacacccgcatcaccgcgccgcgtgacggccagctggggcagattggtgtgcgcctgggggcttacgtgaattccggcgcgcaactgatggcgctggtgccgccgcagttgtgggtgatcgccaatatgaaagaaacccagatggataacgtgcaggtcggccagccggtgacctttaccgtggatgcgctgaaccaccgcaagtttcacggcacggtgcagcacatttccccggcgaccggctcggagttcagcctgttgcaggcggacaatgccaccggcaactttgtgaagatcgcccagcgtgtgccggtacggattacggtggacccggatcaggccgagagcgagcggttgcggccggggttgtcggtggtggtgagtatcgacacggcagggcggctgaaaaacagcccgccctgaatcggcacggtcagtgtgggagctggcttgcctgcgatagctatctttcagtgagtgcagcttttactgatgcaccgccatcgcaggcaagccagctcccacagttggaatgtatttcaggctgaattccaactgggtcgattgcccttgctctaaaagcttgagccccggccttcccggcaaatggtgggcattcaccggatggctcaccggctcgatacaaaagaactcgaactcgggcgggcagaacagcaggaaataatccgcgccgctggcctggcattccagcgcataacccagctccggctgctcaatccggcaatgcccgtcccacgcgcaaaacccattgtccacccgcctgtccggcaggcttttgagctgttggaagtcccagtccgctggtatcggcgccagggcagtgggcaatttggacgcatcactcatccacacctgtgaggccttggcctgcaaccgcgtaccgggcctgcgcggcaaatacgggtgcaaacccaacccgtgccacgccgctttttcggccagatgggtgacgcgcaaggtgatgctcaacgccccgtcactcaaactgaaacgttgctcggcgcggtaggcgaaaggcgtctggcactccaccgccagcaccacttccgccgccgcctggctgaccacctgccacacctgctgccacgccgaaccatgaatcggcagcgggtccagcgggctgttttgcgtcagcgtcaaccagccatccgggttggtgaaaccgccttcggcaattcggttggaccagggggccagtgggtagcagcccagttttccagggagcccggtgttcacggcctgctcgtcactgtggcgcagcagcggctggccggtggcgatgacggtccagttgacgatactgccgccggtggccggggcgagggtgaggtgggtgagttgatcgcgcagttcaatcaagtgtgaagacatggtgtcccgccgtatgaaatagaacaaacccagaggttcagtgtgggagcaggcaagccagctcccacagttgatctcacctgttcttgataattgtgtttacaacaccaatccgggcagccaaagcgacagcgcgggaatataggtgaccgccatcagcaccaggaacaatacgccataaaacggcagcagtgccttcacggttttctcgatactgaccttgcccaccgccgcgccgacgaacagcaccgcgcccaccggcggggtgatcaggccgatgccgaggttgaccagcatgatcatgccgaaatgcaccgggtcgacgccgataccgagaatcaccggcaacagaatcggtgtgagaatcaggatcagcggcgccatgtccatcactgtgccgagcaacagcagcatggcgttgatgcacatcaggatcacatagcggttgtctgacagggtcaggaacagcgtggtgatcttcgccggaatctgcatcagcgtcatgatgtagccgaagctggcggcgaaagcgatcaggatcatcacgatggaaatggtgcgcaccgtgcgatgcatcagcttgggcagctcgcgccatttgtagtcgcggtagatgaacatggtcacgaaaaacgcccacaacacggcaatggcggcggactcggtggcggtgaaaatgcccgagagaatgccgccgaggatgatcaccatggccatcaggccccagagcgcgtcggcgcagatcttcagcgcctgcttgagcgggatgacttcgcccttggggtagtcgcgcttcctggcgaagatcaggcacagcaccatcaggcacgcgctcatcagcaagcccggcaccacgccggccatgaacagcgaggcgatggacacggtgccgccagcggccagcgaataaagcaccgagttatggctgggcggggtcagcagcgcctgcaccgagccgctgatggtcaccgctgtggcgaactcgcggggatagccgcgacgttccatttccgggatcagtaccgagccgaccgaagcagtgtcggccactgacgagccggaaatcgcgccgaaaaacgtcgaggccatgatgttgaccagcgacaggccaccgcgtacgaagcccaccagcaccccggcaaacgccacgagccggcgcgacatgccgccctcggccatgatcgccccggcgagtacgaagaacggaatcgccatcagcgaaaacttgttcacgccgcccgcgacctgaatcatcaaggcctggaatggaatgtcgatccaccaggcgccaatcagcgccgacaggccgagggcgtaggccaccggcatgccgatcaggatcaaggcgataaagctgcccaacagaatcaatgcgtccatatcaggcagccccttcgctttcttcaaccaggtcgaaacgcaccacgcgccggtggctttgatcgccgagcaggagcttttccagcacgaataccagggtcaacagcccgccaatcgggatcggcatgtaggtgatgcccacgcgcagggtcgggatcgcgctcatgaactggttccaggtcgagaggcacagtttgccgccccagaccgtcatgaacaggcagatggtcgccatcaagagttgggaaacgatgccgacaaggcggcgttgggtgggtggaaggcggtcggtgatcatcgccaccgacatatgcgcacccgcacggtagctggcggcagcgccgataaaggtgaacaccagcatcagcaggatcgcggtgggctccggccagcttgagccggtgccgaggatgtagcgggcgaagatgccccagggaatgatcaacgcgacccccaataccgagaggccggcgacccagatgcaggtcatgtacagccggtcattgaagcgcagcagtaaattcttcatggcgttcaccgtaaccgggcacgtcgatgccgaccgcgccgggcctgttgagagaggagggtgattactcgacggcgtcgatgcgcttgatcacgtcggcataggccccgccgtatttcgcgcgaacgggggccgtggcgtcatagaagggttttttgtcgacggtgatgaactcgacgccggcggccttgagcttggtttcgctgctggcggacttggcgtcccacagcacacgttcgtcagcctgggcggccttggcggcgtttttcaccatcacttgctgcgcgggggtgagcttgttccaggtgattttcgacatcacgatgggctcgggcaggatcagatgttcggtgagggtgtagaacttggcgttctggaaatggttgtgttcgagcagggtcggcgggttgttttccgcgccgtcgatcacgccggtctgcagggcgctgaagatttcgccggtgtccatggcgatgccgttggcccccatttcattgaaggcgtcgatgaacaacgggttgccttgcacacgaatcttcatgcctttgaggtctgcgatcgaacgcaccggtttcttggtgtagatattgcgcgtgccaccgtccatccaggccagggcgaccaggccgaactcggagtcggtgatcttggcgaggatctcgtcaccgatctcgccgtcgatgactttgcgcatgtgcgcctggtcacggaacacgaacggcaggttgaacacgtttacgtccggcaccaccgggccgacgatgccgaggctgacccgcgccatctggatggcgccgacctgggcttgctcgacgacttctttctcggagccgagtacgccgcccggaaagtacttgaaggtcagttcgccgttgctttctttggtcagggccttgcccatgttttcctgggcgacgacagtggggtagccggcggggtggatgtcggcaattttgatttccagcgcgtgggcggcgctggcgagggtgagcagcgcagcggcgagcaaggtgcgtttgaagtccatggggtgtctctcctgtcttgttattgttgtattcaaggcacagcaatgcagctttagagggtgaagcggggttcggccagtccttgtacgccggggttgagggcgaacacgccgccagacagcgactgttcggtgttgtcatcgcgaatcgaggtgacgaacagcgtgtccaagcggctgccgccaaaggcgcacatggtgggttttttcaccggtacggtgaggtagcggtcaaggcgaccatcgggggtgaaacggtggatcaggccggcgtcgttggcgcagatccagtagcagccgtcggcgtccacggctgcgccgtcgggacggccgaggaactggtgcatgtccacaaatacgcggcggttggacggcgtgccggtctcgatgtcgtagtcgaaggcccagatctgctgcaccagcgggtgcgagtccgaggcgtacatcgtgcggccgtcagggctgaaagccaggccgttcaaggtgataaagccgcccagttgcgcgtggggcgcagagcctgaggcgtagcggtaaagggtgccctcggccgcattcaggcccatgttcagcaccatactgccggcccagaagcggccctggcgatcacagcggccgtcgttcaggcgcatgtccgggcgcgggtgtttcacgcctgccagcggcgtggtatcgaggctgccgtcgttgtgcggggtgagctggaaaaagcccgtctccatgcccgccacccagttgcccgcgtcggtgcgggcgatgcaggcgagcatctgcggggccttccacgcggcgacgtggccgctggcggcgctccagcgttgcaggccgccgttgggaatatccacccagtacagcgcgttttcttccggcacccagaccgggcattcgcccacggcattgcgggcgtcgacaatcaattcagccgtcatggccactcattcctttgggttgttgatgtgtactcagtcaccgaacggccccgccgcgcagaacgcgccgccctgatacaccttggccgggtcatcggcggccaccggcggctgggtttcaacctgtgcgcggaacacttcggaactgtccttgggcgcgaaacccaggtgcgcggcgtagcggttgtcccaccaggtgtcgaggttatccgacatgccgtagaccacggtgtggcccacgtttggcgtgtatagcgcgcgttcgagcagttgggtcaggtcatcgaagctcagccaggtgtgcatcattcggcggttctgcggttcggggaacgaggagccgatgcggatgctcacggtctcgatgccgtagcggtcgaagtagaagctggccatgtcttcgccgtaggatttggacagaccgtagtagctgtccgggcggcgcggggagtgggcgtcgatggtttcgccctgtttataaaagccgatgacatggttggagctggcgaagatcacgcgcttcacgccatggcggcgggcggcttcgtagatgtggaaaatgccgctgatgttggcgccaagcacttcttcgaaagaacgctcaaccgacacgccaccgaaatgcaggatggcgtcgacgccttcaaccaggtgatgcacggcttgtttgtcggcaaggtcacagatttgcacttcttcggcggcatccgcagcgggggccatgttggcgatgtccgacaggcgcagcacctgggcatacgggcgcaggcgctcgcgcaggactttgcccaggccgccggcggcaccggtgagcagcaggcggttgaatggaacgggcgtggtggtggttgtggtcatgggggttccattgttgttgtaggttgtcgtatgacttggtggaagtatcgttagtgattccccaggttgtcaacgcccgtcctgactaatggggtcaaatgtgggagcgggcttgtgtgggagctggcttgcctgcgatgcaggcacctcggtctgtcagttacatcgcggcgatgctatcgcaggcaagccagctcccacaaaaagctgggtctcagatagccaacatccacattgatcgggttacaacaacgaaatcgggtagctgataaagagccggttctcatcaaactcgttattactgaaatcccgacgcatagtcgaattgcgccaccgtacgttcaaatccttcagcgtaccgctctgtacggtgtaggccagttccgactcgcggccccattccttgccgtcggtgatggccccggtgtgcacgttactgccgctgatatagcggttcatcatggtcagccccggaatgcccagcaccacgaagttgaagtcatggcgcacctgccaggatttttccttggcgttgtcgtagctggcgttgtagctatcgttggccagggtaccgccgctggtgccgttgaccttcatccacacgctgtcgccggtgagtttttgcaggccgacgtagaaggcattgcccttgtatttggccgagagcagggcgaaggcggttttgttgtcgaggtcgccggccagtgcgctgccgtcttccttgccggtgaagtaaccgaggttggcgcccagggtccagtcgcccacgggctggctgtgggtcaggttgaagtacttttgctggtagatatcactcagctcggcgtaccacacgccgacctgggtgcgcttgtcgttgaaggtgtattcgccgccgccgaagttgaaacggtcggaagtgaacgcggctttgccgttcatgaacatgtcttccatgctcgcgtcgttgcgcgggctgttgccacggaactgcccgccgtagagggtcaggccgtcgatttccttcgaggtgacctggccaccacggaaggtttgcgggagtgagcggccgtcgtcggaacgcaggatcggcagcaccggcatccactcgccgaccttcaattctgtctgcgacagcctggttttcaaggccacgcccaggcgcccgaagttgtcggcggggcggccgtcgctgtggatcggcagcaactgtgtgccgccggtgcccttgccgccatcaagcttttgcgaatacagcccgagcacatccagcccgaaacccacggtgccctgggtgaaacccgatttggcatcgaggatgaagttttgcgtccactcttcagctttagcctgagggtaggtcgggttggtgaagttgcggttgaagtaggcgttgcgcaggttgagcgtggcggtggcgtcttcgataaaaccatcggcctgggcgctgagggggagggtgaacgccaggctgccgaggccgataagaccaaggcgcgtggaggaattgcgggcgaatggactcacagtgaagctccctttctattgttgtttttattatttgtcgtacgtcgtcgtacaacattacgcggatatttgcggggttttggcggggtgtcaagcggaagttgtaggatgactagaggttgagccgtcaaaaagcgggcacggtcaatgtgggagctggcttgcctgcgatgcagacacctcggcctgtcagtgacaccgcagtgatgctatcgcaggcaagccagctcccacagttgagcgtatttacaaggggatattagttagccatgaccatcgggggcagggtgccgaggagggagacggcggctaccgctgaaatacccaataaccattcgagcatcacactggccttcaaactgccccggcgcgtctcgcagtgttcaatccgcaaccggttcagcagcgccagcgccaacatgcccagcaccagcagcactttgatcagcagaatcagcgcaaagccatcaaacagcggcgtgggccacagctgcccggtgagcacgcgcacgttgatcagcccggtcaccagcaaccctgccaccaggccgtaacccacgccgctgaaacgccgcaaaatcggctccagagccaagcgttcgggctgccgcaggatcaacaccagcaacaacagcccgcccagccaggcgccgacgcaaaccagatgcaccacctgattgaggatcagcaattgcccgctcaacccgttgagcatggcgccatggccgaccggtgcgagcgtcgccagcagcagcgagatcaagggcaggcgcaacgccggccagggtttgatcaacacgatgaccagcagaagattcaacaacagatgccacgcccacacctggccgaagaaggtcttgcccagcaccaactgcacggtggccggttgcagtgctgcgtcccaactgccggccatgctggcggtgatcaacagcaaccacgccacgccggagcccagcccgacccaggccaggccacgggtggtgcgcagccattgccggtccagcgccggctgcacgcctttgccaagcaacaggggcctgaacacgcaggccccgaacatcagcaaaatgacaatgaaatgcaggaagcggcacagcaccagcacggtcgccatgggttattggccgaccttgaagctgtattcaccgttgctcttgtgggtgtcgaccgacacggcattccacaccaccttgtagttaccggccgccaacggtgcggcgggggtgaccaccagtacttttttgtcggcgtcgggggtttccaggcccttgatggcgatttcggtgccgtctttgctcagggacactttggtgaaagtggcttccacgccttcgctgaaggtcaggcgcaggtcggcgggggcggcgacggtgctgtctggcgcaggcgtcgagcttttcagatgagcatgggcaaacgccgccgaggcgccgagcaaagaggcgaggagggcgacggtggtcagggctttcttgatcagcattgttcaatacctcaaggtttgggagttggaagagccatgtgcagcaagggaaagggcttgccttcgccatccagcggcgaacgccccacttgaataaacccatagtgcaggtagaagcctacggcctgggggttttgttcgttgacgtccaccgtcagcgtgtcgtgtcgcgccagcgcgtggtccagcaactggcggccgatgccctggccacggcgtgcaggttcgataaacagcatttccacgttgtgcccgccggtggcgacataaccggcgatgccctgggcgtcttcgtacacccacacatcaagtgccggcatcggcaggtaggcgtcccttaccaaaggcagcagacgctggatgtcatcctcggggaggaagtcatgagtggctcgcaccgagcgctcccacagtgctccgagcactgggtcgtcggcggccacgcgaggtcgaatagtcatggcaatgatccttcaaagggaccgcgatcctaaccaatcctttttggaggggaaagcttcgcgcaagaagtttcacgtggctctgcgccgggcttatcacccaccggcaacccggcgccgtttggtttggtacatgtcgtcatctgcacggctgagcagcgtatcggcgttctcgccgtctgccggataaacggccacgccgatgctgcaggacggcatggtgacgccgtgaaattcagcgcccaacggttcattcatgaccgtgagtatctgggccactttcgcggatacagcgtcctgcgactcaatgcccgtcagcagtaccgtgaattcatccccgcccatccgcgccaccagatcaccgtcatgcacgcagcgctccagccgtcgcgcaatcacgcagagcacccgatcacccatggcgtggccgtgcacatcgttgatgcccttgaagtcattgacgtccagaaacagcagggcaaaggtgctgttttgacgctgtgccgtctgcagggtcgaatccagtcggtcattgaacagcgagcgattggtgagcgccgtcaacgggtcgtgatgggcgaggaatcgcaactcttcctccgcctggttgagcgccgtgacgtccctggccaccccgattcgcgcacccacctcttcggaccagaaggcggcccacaggatgtgtacgatcccgccatccttgcggatataccggttgcggaaatcgacgtggggcttgccgttcatgacccgcacaatcgaggcccgggtgcgggccaggtcttcggggtgcatgtagtcggtgatgagcgtgccggtcagttcgtcggcccggtaaccgagcagcgtttcacaggcgtcgcttacaaatacgatcaggttgtcgctgtcgaccacgaagaccgtgtccagcatcaggtggatcagtttggggtagagggcttgcaggtcgacggccataggtctgggtgtccggttcagattcgccgatcatagcccgatctgtcgttcaacggcgcacggcggcggcgcatccggacgacctgccgttgcgtcggggtgaaagtgaaggtgtgtggcctaatgcggcggttcgtgatgttatggcgcatccctaacagtgagtgagcttgcagtccccatgggcaatcacaagatcggaattcgccgggtcaacgtcgaaaaaatcctgctggcggcggagaaaatcttcgccgagaagggctatggcagcactgccatggccgacatcgccgaagaagtgcagctgccgcgctccaacctgcattactacttcaccaccaaaagcgagctgtacagtgcggtgctgttcgacctgctggaagtatggaagcaggacgccctgagcttcgaaacctttgatgacccgcgggtggtgctcagcagttatatccgcgccaaaatgcagcgctcgcgcacgcggccgtatggctccaaagtctgggcgaatgaaatcatccacggcgcacccactctcggtgaggcactggatgaaagcctgtacgactgggccaagatgaaggaagcgaaaatccgccagtgggtggaagacaaacgcattctgccggtggaaccgtcgagcctgctgtatatgatctgggcctcgacccagcactatgcggattttgatcatcaggtgaagattctgaatgatcaccagccgttgtcggacatgcagtttgagagggcgattcagacggtcacgagtgtgattttgcgcgggatcgggttggagccctgacttttgtggtggggctgagggcctcatcgcaggcaagccagctcccacatttgaatgtgttcacaaatcaattgtgggagctggcttgcctgcgatagcggtctacagggctacaccgcctcccggtaaggattgcgcggatcctgcgtccagttcaaaaacggcttgcccgtgtccaccggcaccatctcgatgcactcggccaccgggcaggtgatctggcacaaattgcagcccacgcactcatcatcgatcacctcgtacttatgcgtcccgtccgcctgtttcaaactggcgatggcctggtgcgaggtgtcctcgcaggcaatatggcaacgcccgcagccaatgcaggcttgctgatcgatcttcgcaatcacttgatagttgatgtccaggtacttccagtcggtggtattgcctaccgcccgcccggaaaacgcctcgaggtttttatgcccttggctgtccatccagcgcgacagcccgtccttcatctcttccactatccgaaacccatgcagcatcgccgccgtgcacacctgcaccgcgccgcagcccagggcgacgaactccgccgcatcgcgccagttgccaatgccgccaattccgcagattggcagcccttgggtttgtgggtcgcgggcgatttccgccaccatgttcagcgcaatcggcttgactgccgagccgcaataaccgccgtgggtactttgggtgccgaccataggcaaggcgaccatgcgctccaggtccacgctggtgatggagttgatggtgttgatcagcgacaccgcatccgcaccaccgcgataggccgcgcgtgcagccacgcggatgtcggtgatgttcggcgtgagcttgacgatcaccggcagcgagcagtacgtcttgcaccagcgcgtcacctgttccacgtattccggcacctggcccaccgccgcacccatgccgcgctcgggcatgccgtgggggcagccgaagttcagttcgatgccgtcgcagccggtggcctccaccagcggcaggatggttttccacgacgcttcaacgcacggcaccatcagcgacacgatcagcgcgcggtccggccagtcctttttgacctgggtgatttcccgcaggttgatctccagcgagcggtcggtaatcaattcgatattgttgatgcccagtacttcacggttagcgccgtagtgcgccgaatagcgcgacgacacgttgacggccgccgggtcctcgccgagggttttccagaccacgccaccccaaccggcttcaaaggcgcgcaccacgttgtaggccttgtcggtcggcggcgcagaggccagccagaacgggttgggggctttgatgccggcaaatacaatcgagagatcagccattacgcagcctccacattcagcatgagttgggtgtgcatggcctcggcggccagcttgccgtgttgcacggcctgcacggtgaggtcctggccgaggctgatgcaatcgccccccgcatagacccccggaatgctggtttgcaggtgctcatcgacgaagatccgttcgcccacgcggtgcagctgctgggccagcgggtcgtgcagcgcctcgttgtcgaagccttgcccgatcgccttgaagatcgcatcggcggcgagttcgaaggtttcgccggtggggtgcaggcggccgttttccatgcgcgtgcgcaggaagcgcatgccgcgcacgtggccatgttcgtcgagcaaaacctcttcaggttgggcccaggtcaacaggcgcacctggttggccttggcgatgtcttgctcgtggtgggtggcgcccatgtcggccaggccacggcggtacacaaggctgacatcgcgggcaccgaggcgggccatttgcacggccatgtcgatggccgtgttgccggcgccgagcacgatgcagcggtcggcgaggggcagttgggtcagatcatcggcctggcgcaactcgcggatgtagtcggtggcggcgagcacgccgggtgcgtcctcgtgcggcaggccgagctgcttgctggcggcaaggcccagaccgagaaacaccgcgtcgaattgctggtgcagttcgctcaaggtcaggttgtcgcccaggcgctggccgtggcggatttcgatgccaccgatttgcaggaggaactccagttccttctgggcgaagtcatccaccagtttgtacttggcgatcccgtattcattcaggccgccggctttttcgcgggcttcgaagatcaccacgtcatggccgtgcaaggcgctgcggtgggcgcaggccaaaccggcaggcccggcgccgaccacggcgatgcgcttgccggtgggcgcggcgcggtggaaggggtgttcgctgaagtgtgcgttgtccacggcgtagcgttgcagcaggccgatcagcaccggtgcgcattcttcactgttgttgcgcacgcaggcttgctggcagaggatttccgtcgggcagacccgtgcgcaactgccaccgaggatgttggccgacaggattttctgcgcggcgccttgcacgttgtcggtgtggatattgcggatgaaggacggaatgtcgatctcgctggggcaggcattcacgcagggcgcgtcgtagcaatacaggcagcgcgaggcttccagttgcgcctggcgggcgttgaggggcggcgccaagtcggtgaaatggctggcgagtgtcggcccgtcttcatgggggtgggggaggtgggtcagggtctggatcacggtgttggcctcacggttattgaggtgctgcctctgatgggcagtggtttttgtgttgcctgtgctggcctcatcgcaggcaagccagctcccacatttggactgtgttcacaaatcaaaactgtgggagccgggcttgcccgcgatagcggtatcagcgtttcacagcagtgggcctggaatgctccgcccgcttgcccaactgctcaaacaccgccggatacgccggccgctccacataccgcccggccccgcgctctgcgcgcaggtcgccatcggcccagaccagcttgcccctgctgatggtgtggctcggcacgccgcgtacggtcttgccttcgaagatgttgaagtcgacgttttgatggtgggtcttggcggaaatggtccgcgtaccttcggggtcccacagcaccagatcggcgtcggcgcccacgcggatcgcgcctttgcgtgggtagaggttgaagattttcgcggtattggtggaggtcagcgcgacaaactcttgcatcgacaggcgcccggtgttcacgccttcgtcccacagcagcgccatgcggtcttcgataccggcggtgccgttggggattttgctgaagtcatcacgcccggcggctttttgttcggcgcagaagcagcaatggtcggtggcggtggtgtgcaggttgcccgattgcaggccgcgccacagggcctcctgatgcccgcgcggacgaaacggcgggctcatcacgtagccggcggcggtgttccagtcggggtgttggtacacgctgtcgtccagcagcaggtggccggcgagtacttcgccgtagaccggttgaccctttgcccgggcgtaggtgatttcgtcgagggcttccttggtcgaaacatgcaccaggtacagcggcgtgccgatggtttcggcgatcctgatcgcacggctggccgcttcgccttccacctgggacggccgcgacagcggatgcgcttccggcccggtgatgccctgggccatcagcttgcgttgcaggtgatacaccagctcgccgttttccgcgtgcacggtgggcaccgcgcccagttccaggcagcgttcgaagctggcgaccagggtgtcgtcggccgccatgatcgcgttcttgtaagccatgaaatgcttgaagctgttgatgccgtggtggctgaccagctcggccatttcctcgcgcacctgctcgctccaccaagtgatcgcgacgtgaaaaccgtagtcggaggcggatttttccgcccagccacgccactggtgaaaagcttccatcagggattgctgcgggttgggaatcacgaagtcgatgatcgatgtggtgccccccgccaggcccgccgccgtaccgctgaaaaagtcttcgctggctacagttcccatgaagggcagttgcatgtgggtgtgggggtcgatgccgccgggcatcaaatattggccgctgccatcgagtgtttcagtgccggcgggaatatccaggttcgtgccaatggcgcgaattagaccgcctgcgcataacacatcggcgcggtaactttcatcatgggtaataacggtggcgccacggatcaacagcgacatgtcgagttcctcacaggcttgaccggcttgtgccagttctaagtgttgtagtgctgctaaccgatggtcggttaattcctgtcatgggtgacaggaatagaaactagcccgagtttttcgattgggcaagaagattttttataagcttatatcgtatttaagttgttgattattaatgataaaaatctgttttcaccaaaatgaagcgccgtctcaccattttgacgaacttgacaggttcctgaattgagcaacatttcttattgcaaatcaggcgcttgagacatgcctcttgacgggcatgggaaataaaaataattgtgttgcaccagattgagtcctgaaggttaggacaacttccacgttagttagcctgagtaacgcggcaagtaccgaagggccaatcggaaagctgataaacatcagcaagttatataagcggtacgggttcggtaacggttgtcggcacggatattgagtgcagtggcggctggccgggcccgtgatgtcatgttgtttatgcggtactgcggccacccggcgcgatgcgttgggtgagcaacaataattcgaaaaaaccgtggagcggccatgcaacagaacagatcgcaagtcattgagcgcaacggcctgtacgaactcgacgccggccccgacgtcctcgacagccctcgctacaaccacgacatggcaccgaccaaggtgcacgaacgaacctggaacaaatggcacatcaccgcgttgtgggtcggcatgtcgatctgcgtgcccacctacacgctgggcggcgtgctgactgcctacttcgggctgtcggtgggcgaggcgctgatggcgattttgctggcgaacatcgtggtgctgattccgctgaccctcaacgccttccccggcaccaagtacggcattccgtttcccgtgttattacgctcctcattcggcatcctcggctccaatgtgccatgcctgattcgggcgctggtggcgtgcggctggttcgggattcagacgatgtttggcgggctggcgattcacctgttcctcggctcgattttcgagggctggaaatcgttgggcggcaccggtgaagtcatcggcttcatgattttctggtgcctgaatttgtgggtggtgttgcgcggcgcggagtcgatcaagcgcctggaaaccctgtcggcgccactgctggtggcggtgggcattggtttgctggtgtgggcgatgcccaatgtgtcactcagcgagttgatggcgatcccgccgaaacgcccggaaggcgcgagcctgaccggttacttcatggccggcctgacggcgatggtggggttctgggccaccttgtcgctgaacatcccggatttcagccgctacgccaaaagccagaaagaccagatcctcgggcagattttcggcttgccattgaccatgttcctgtttgccgcactcggcgtgatcatgaccgccgcctcggtgaaactggtgggcgtcagcgtgtccgacccggtgaccctgatcgggcatatccagagcccggtgtgggtagcgattgccatggcgctgatcatcatcgccacgttgtctaccaacacggcggcgaacatcgtgtcgcccaccaatgatttccagaacatcgcgcccaagctgatcaaccgcaccaccgcggtgatcctcaccgggctggtggggttggcgctgatgggccacgagttgctgaaaaaactcgggctgattgtctccgatgtgagcctggaaaccgtgtattccaactggctgctgggctattcaagcctgctggggccgattgccgggatcatggtggtggactatttcatcacccgcaaacagcaacttgacctggccggtttgtaccgcgatgacgtgtacccggcgtggaactggagcgggtttattgcgtttggcgtgccggtggtgttgacgctgctgtcgctgggcagcgatgcgttaagttggttctacagctatggctggtttaccggttcggcgttgggcggagtgttgtattacggcttgaatgccaagcgcggcgcccgcccaattgccgttaaaacatcgttgtaaacacggtcaatgtgggagctggcttgcctgcgatagcgtacggtcagctgaaacagggttgactgatacaccgctatcgcaggcaagccagctcccacacaagccagctccagccgttgagacaattcataagaatgtagcctgaggagatccccatgaacgctgcccttgacgttctgcaatccacccatcagcacatcaaccgcgaccgtttgtggcagtccctgatggacctggccagactcggcgccacgcccaagggtggcgtctgccgcctggcccttactgatctcgaccgcaaggcccgcgacctgtttgtgaagtggtgcgaggaggccggttgcagcgtgaccgtcgacggcattggcaacatcttcgcccgccgccctggccgcaatccgaacctgccaccggtgatgaccggcagccatatcgacacccagcccacgggcggcaagttcgacggctgctttggtgtgttggccggtgtggaagtgctgcgcaccctaaacgacctcaaggtggaaaccgaggcgccccttgaagtggtggtgtggaccaacgaagagggctcgcgttttccgccatgcatgatgggctcgggtgtatttgccgagaaatttaccctggccgataccttggccaaagtggacgtggatggcgtcagcgtgggcgatgcgctgaatgccattggctacgccggcacgcgccccgtcagcggtcataaggtcggggcttacttcgaagcgcatatcgagcaggggccgattcttgaggacgaaaagaaaaccatcggcgtggtgctgggcgcgcttgggcaaaagtggttcgacctgaaactgcgcggtgttgaagcccacgcggggccaacgccaatgcatctgcgcaaggatgccctggtgggtgcggcagcggtggttgcggcggtgaatgcggcggcgctcggtcatcagcctcatgcgtgcggcacagtgggttgcctgcaggcctatccggggtcacgcaacgtcattccgggtgaggtgcgcatgaccctggacttccgtcatctggaaccggcacggctcgattcaatgattgctcaggtgcgagaggtaattgatgacacctgcgccaagcatggcctgagtttcgagatggagcccacagcggatttcccgccgttgtacttcgacaaaggctgcgtggatgccgtgcgcgatgcggcgaatgggctgggcttatcgaacatggacatcgtcagcggggcagggcatgacgcgatttttgtggccgaactgggcccggcggggatgatttttgtgccgtgtgaaggcggcatcagccataacgaaatcgagaacgccgcgccggatgatttggccgcggggtgtgcggtattgttgcgggcgatggtggcggcttcggcggcgattgccggtgggaaattagctgcctgacggggcctcatcgcgggcaagcccgctcccacaattgatcgggttcacaccgttcaatgtgggagcgggcttgtcgggtcgccgcatcgccgcgatggcgtcaggtcaggcgcccggttgccagccgccccccaacgcagtcaccaaccccacactcgcctgcaactgccgcgtctgcacagcctgcaacgttctttgcgcctgcaacgccgccgtctgcgcggtgacaacatccagataactcacggcccccgcctgatagctgttcatcgccagtgactgagtatgttcggccgcatccgccgccgcctgttcatcctgggcttcctgctgcagatcgcgcagttgcgccaggttgtcttccacctcacgcacggctttgagcacatggctgcggtactgcgccgaagcttcttcaaactcggctttggcctggcgttcattggcgctcaagcggccgccatcgaagatcggcaggttgaccaaaggccccagcgcccaatagcggttgccggctgaaagcaggttgcccacgccctgagtctgcccgccaatcaacccggtcaggctgaaatccgggtaccacgccgctttggctacgccgatattcgcgttggcggcgaacacccgccgttctgccgccgcgatgtccggacgacgttgcaacaggtggcttggtagctgcgaaggaatgcccggcaaggtgatcaactgttggctcgccggcagctcgaaatcactggccgcgacgcctaccagttcgccaattgcatgctcggtcaggttgcgctgcccgcgtacttcatccagctgcgccttggcttcggccagttggttttgcgcccgcgtcaggtccagctccgacgcaatctggccctcataacggctgcgcgtgagttgcagggcttggctgaaatcatccagcgagctgttgagaatccggctctgtgcatccagcccgttgagctgcacgtacaaggtcgccaactgatgttgcaggctcaagcgcgccaccgccaaatcatcgccggacgcctgcgcctgggcatctccggccgccacctgattgcggattttgccccacacgtccaggtcgtagctcaacgaaaacgccgccgtattgctgttgtacacggagggctgcgtatccccgcgcaagggccgtgaatccgattggcgctgacgcaacggctgcgcgctggcggtgatctgcgggaacaacccggcgtgcagttggctggcataggcctgggacgcatcgaagtgcgcgagtgccgctgcgagatccgggttggccttgagcagttgctgttgcaggtcattcaggcgcgcgtcgttgtagagcttccaccactcgggcgccaactggtcggacggctgcgcactgtgccaggggccatcgcgggtctgttcgcggtagcccgccggcaggttgaccgttggcactttataggtgggcgccatcgagcaaccttgcagcgccagcagcatcaacgccgccagggggttaagccttgggcgcatgggcacctccggcttcggccaactgcacggggtcaccttcgcgcagggcatcgggcgggttgtcgactactcggtcggcagggttgaggccctggtcgatcaccaggcgggcgccgaggtcgaggccgatgtggatggtttgcaggtgcacatggttctgcgcatcgagcagcgcaacctgagtgccctcggcgcggaagatcagtgcgctggccggaatgctcacgccgtgggtgtctgccggaatcggcagggtggcttcggcgtaatcaccgggcagcaattcgccgttggggttgtcggcgacgaactgcgcgagcaaggtgccggagcggcggtcgatggcggtggagtcgccgatcaggtgcgccttgaagtgctcgccggggtgctcgggcacggtcaactcggcttcgaggccagggtgaatgaccgccgcgtagttctgcggcaccggtacgtagaggcgcaattggtgggtgtcggcgatgttgaacagctccgggtcgctgtcggtatcggccttgatcaactggccgatatcggtgttgcgcgcggtgatggtgccggcgaacggcgcgcggatggtcttgtagctttccagcgccgacagccgtgcatagtcggcggcggcagcttcggcgttggccttggcggcggcggcgttggaagttttctcatcggcctcctggcgcgacaccgaatggctggccagcaggttttgccagcgggtcgcggtggttgccgccaggcgtgcgttggcttgttcctggagcaggcgggcgtgggtttgcgccagctgctggtcgaggtccgggctgtcgatttcccccaggatttgcccggccttgacctggctgccgatgtcgactttccagtccttcaaatagccgctgacccgcgcgtgaatcggcgccttgctccaggcttccaggtgcgcgggcaggcgcagggtgtcgccggcggcgttctgtttgggttggaacaccatcacttgcgggatggcggcggtttccgtccaggcggtaaccgattgttcgtgcagcgtgcgggcgtgcaggccgttggcgaccaacaaggcggccagtgtcaggccgccggcacccatgagcatcagacgcttgcgcgagggtttgtgatcagacgacatgtggcgtttctccagcagttgcgcgagtagggtgacggccgtggaccaggctgaagaccacgggaacaaacaacaaagtggcgacggtggcgaaaatcaaaccgccgatgacggcccggccaagcggggagttctgctcctcggacagcgccagcggcagcatgccgatgatcatcgccagggcggtcatgcacaccggacgaaagcgtgtgtaaccggcttccatggcagccttgagtgcatcgccatgttcggcgaggcgttcacggcagaagctcaccaccaggatcgagttggcggtggccacgcccatgcagaggatggcgccggtcagcgcgggcaccgacagcgaggtgccgctgaggaacagcatccacacgatgcccgcaagcgccgccggcaatgcggtgatgatcacgaacgggtcggcccaggattggaagttgaccacgatcagcaggtagatcagcaccaccgctccgagcaagccgaagctcaaaccgctgaaggcttcatgcagcgcgtcgatttgcccgtgcaggctgatcactgcgcctttggggcgcatggacgcggtgttatccaacactttttgcacatcgcgcgccacgccgccgaggtcacggccctgcacgttggcgtacaggtccaacgtcggttcaatgttgtagtgagtcaccaccgccgggctttgcacccgggaaatgctcgccacaccgccgaggatttgcgactggccgtcggcgccggtcacgggcagggcttccagcgacggcaggctgtcgaggcggtattgcggggtagccgcgacgatcgaataggacacgccgttggccgggttgagccagaaggtcggtgccacctgtgagctgccggcgagagaggcgaccatgctgttggttacgtcgcgctcggtaatgcccaggccgttggcgcgcatgcggtcaacgttgacttgcagcgacgggtagccggtggactgctggatacgcaggtcggcgatgcccgggatgtgcgacaggcgacgttccagttccaccgcgtaggcgcggttttcctcatcactgcgtccggagattttcacgtccagcggtgcaggagcgccgaagttgagaatctggctgctgatgtcggcgggcagaaaggcgaaatggctgccgggaaagctttccggcaaggcttcacgcagttttttcacgtaatcggcggtcggcgcatgctcctttttcagggtgacctggatgtcgccgtcctgcgggccgatggtgccgctgctgctgtaggccatgtcgatgccactgagcggaatgccgatgttgtcgacgatggtgtcgagttcttcggcgggaatgacttcgcgaatccgcgcttcaatccggtcaaaagccgccgcgctttcttcaatgcgcgtgcccagcggcaagcgcacgtgcagggcaagggcgccggcgtcggtggccggaaagaagtcctggcccaggctcggcaacagcaggaacgaagcgagcacgcaggccaggaagccgacgataaaccgcttgcgcgcgccgagtgcgaggatcagcagcccgtggtaggtgtcgcggatattcgagaagtggcgctcgaaaccctgctgaaaattcagcaccgattgcagcacgcgattgcgtggctttttgtgttgctcaccttcgtgatggttgatgaatgcatcttcggggtgatgccctgcgccttgctccggtgtatgcggcttgagcaggaacatcgccagggtcggcaccagggtgcgcgagaggatgaacgagctggccatggcgaagatcaccgccagggccatcggccggaacaggtagccggcgatgccttgcagcaagaacatcggcacgaacacgatgcaaatgcacagcagcgacacgaacgccgggccgacgatctgcgcggcgccgtcaaggatggcggtcttcaccgccttgccttgttccaggtgccagttgatgttttcaatggtcaccgtggcgtcgtccaccaggatccccaccgccaacgccagcccgccgagggtcatcacgttgagggtttgcccggtggccgccagcagggcgatggccgagagcaccgcgagcggaatcgaggcggcgatgatcagggtcgaacgccagctgccgaggaacagcaggatcatcgcactggtcagcagcgcggcgatgatgccttcctgggccacgctgcccaccgattgtttgacgaacaccgaagcgtcacccagcagcgaggtcttcagcgacggcggcagggtttcgttgatgcgcggcagcatctggcggatgccgtcgatgatcgacagcgtggaaatgctgccgtttttcaacgcaggcatgagtacggcgcggtggccgtccacgcgcacgatgttggtttgcggcggcgaaccgtcgcgcacgtgggccacctggccgatggtgatgattgcgccgtcgactgtcttgatcggcaggtcgttcagctcatcgatcgccttggggctgttgttgagcaggatggtgtattcgttgggaccgagcttggcggtgcccaccgggatgatttggttctgcaaggccagcgcgttgccgacgtcctgcgctgacaagcctttggcggccagtgcctgtgggtcgaggtcaagggtgatctggcgttgcttgccgcccatgggggtgggcatggccaggccgggcagggcgctcagtggcaggcgaatgttgttctgcaccaggtcgcgaattttggcttccgagaggctcgggctggaaaacgccagttgcaggatcggcaccgtggaggcgctgtagttgaggatcagcggtggcgtgatgccgggtggcatctgcttgagcacggtttgtgaaaccgccgtcacctgggcgttggcggtgcggatatccacgccgggctggaagaagattttcacgatgcccatgccgggcagcgattgcgattcgatgtgttcgatgtcgttgacggtggtgctcaaggagcgttcataggtgtagatcacccgaccggccatggcgtccggtgacaggccgttgtactgccacaccacggcgacgacggggatgccaatatcgggaaaaacgtccgtgggggttcgcagggccgccatcggcccgatgatgcagatgaatatggccaacacgataaacgtgtacggcttttgcagtgcggtctttaccagcccgagcatgcgtgaacctccgagggagcaaaattgcaaaccccggcagtcttgcccgacccacctaacacgcacctttcagccaggtgaaggaacatttagttaacggctgaagatcgtttcatatgtattcatttgttgtacataagggggccctccaagcttgtagcccatcggacacgacacaattacgccgagtccaccgagtttactgatgccctttggagccctgccatgtcattcaagcacctgtcacttaaaccacttttgttgatccctgccctcggcgccgtgctgctgttgtcagcctgcgccgggcccctcccgaaagctgaccccagcgaagcctggatcggcctgaaagaagaagcgccgaatgacctgatggcggagcgggtggatggcaagcgcgtggatgatggccgtttctttgaagtgacccctggtgaccatcgtcttgacgtaaccctgtttgaggaagagccaggcgatgacaaccagcaagactgccagggccgggtcgagtacaaggacttcaaggcgggtgagcactacaccctggtggaatccagcctgggcactaccgtgcgcgcatccctcaaggatgagcacggcaaggaagtcgcagcgactcaggacttcagttgcatgcctggctaggcgtgatgcgccgccgccctttggggtttggcaggtgcagcaggtttgacgtgggggggatgatgccggcgcgtgacgcgcatcacgccccacaacatggcggcggctactgccagccaaccgcagaccagcaggaaaatagttgttgcaaggctcattcgggcctcctttcgccccgcaggggcacacacagtcttctcaatggacagtctagctacctggcggttgcctgctattgaccaatggtcgtgtccgtccaacttgtttgctctatgccgggcgttttactgacgttgaaggctataccggcgtggctgggcgccctatgatcagggcccttaccggcagttgatcaagagagcagaaaattgcgtttacgctcgaacgttaaaacctccttgttgttggcctgcgctctggggctcgcggcctgttccgggcacccgtccaggcttgcaggcttgccggaacgtgtcgaactcaatggcgtgccgacctttcgcagcgaggcttacctgagcggcccgagtgctttagccagcatgctgtcgcaacaaggcattgtcatgacacccggcttgctcgataagccgctccatctgccaggcggcgaggctgaccttgagcgcaacatgcaggtgctggcgcgtgagtacgggctgatggtgtacccgctggacaccgagctgacggcggtgctggcgcaggtggcggcgggttacccggtgatggcgcggatcaatccgagcctgtggtccggcacgcggtatgtcgtggtggtggggttcaatcagcagaaaagtacggtactgctgcgttccggcctggaccgccgtttgctgatgagcttcagcgattttgaatcagcgtggaagagcgccggtcactgggccatcctgacccagcgcccgagccagttaccggccaacgttgatgcacaacgctggcgtgaggcggcgaatgcgacggcgcaggccgggcaggagcaggcggcagcgcaggcgcttaaagtgttggcggagaaaaagtaaacagcactgatataaatgtgggggcaggcttgtgtgggagctggcttgcctgcgatagcatcaacaaggtccagctgaaaaaccgggttgcctgcatcgcgggcaagcccggctcccacataagcccacgctcacattaggactgtgtgatgtttagcgacgcacttctgcagcgttcgggcggttcttcaggtttttgtcggccttgtagcgcaacgccacatccggcaccgaaccgctcttgccagtctcgacccagttacgaatgcgcgtcgcatcggcgaagtgggtgaatttgccgaacgcatcaaggatcaccagcgacaccgggcggttgcccatgctcgttaccagcaccaggcagtggccggcctggttggtgaaaccggtcttggtcagcttgatatcccaactggcgcggttgatcaggtggtcggtgttggagaaacccaaggtgtagttgggcttgcggaacgccacggttttttccttggtggtactcagttggctgagcatcgggtatttacgcgcggcggccagcagcttgctcaggtcgcgagcggtggacacgttgtgaatcgacagcccggtgggctctacgtagtgcgtgctggtcatgccgagcgccttggccttggcgttcatcgccgcaataaaggccgggtagccaccggggtagtggtgggccaggctggcggcggcacggttctctgaagacatcagcgcgatcagcagcatttctttacgcggcatttcactgccgattttcacacgggagaacacacctttcatctccggcgtgtccttgatgttgatgtcgatgtactcgtccatgttctgcttggcttcgagcacgatcaaaccggtcatcagcttgctcaccgacgcaatgggtactaccacgtcagggttgctggcatagatgactttgttggtctgcaggtccaccagcatggcgctgccggaggcgatttgcagtttggacgtgtcacgcggggccagggtggattcggcggcgtgcgcaaaggtgcctgtaaatgcaaaaaataggctgacaatagagagacgaattttcacgcgggtgaactcgctaaaaaggtaaggaaataccgttcaggaacgggttatatgacaaatgccgttacattttaggagtatggatcagaaagtgatagaggcctttaaataaaggctgtaagccgatgattggtaggggttgtatcgaattttgtaccggctttagcggcaacggcgccaagcaggtctgtgggatgcgggcgggtggcgaggagggctctcaagcttgcgacagcgtctccggcgcacgtttccaggatagtccaggaaaaagcgcccgactttttaaccgtcagcgttgattttcagccgttccacagcccgcgcgcagccgtagttggcggctctctgaatatagtgctgttgttccactttcaggtgttgccgggacatttgggtagcaaggctcaagtagagttcggcgcgaacagccttttcatccatgggcaggattatttcgttagttgcggagcccgcagtccgggtgcaaagctgcatgactaccggttgcggatagtactggccgtagcgagtgtcagtgtccggcaaggcatcaatcagcgctcgataatcgagcgttgccacatcgtcaaagcaatagctgagcattcgtaagcctgccggggcaaaaccttgtttcaggcttgctttcaacaacgagcatacttggccgacaacctggtcccggtcttcaaaggtcgcggaaagttcagccagacggtattgcgcggcggggtttcccaagtcggatgagcgttttatcagaggggcggcctccttcagaaggtgctgtagcgtatttttatagcgttctttttccgtctgagggaaagcctctcctttggcgagctgactgcgcagggtaaagattctgttctcttcctcgttgatgctgttcagatagggcagtgcctggaagtaaagcgcgtccgattcggatgaagcagggagtggctcggcttgagcgagcgtcgtggcgagggcaaggcaggcaattgacaggcatccggcagtgagtgttgtcacggtttcatccttgtgagggtgttgaagcgctgtgctcttaataggtaggcaataaaaaccccgcgattgcgcggggtttttaattcggctgcttatcagccgtgcagggtctctgctgcatacagcgtattttccagcaggcaggcacgggtcatcgggccaacgccgcctggtaccggggtaatccagcgggcgcggggcagggcggtctcgtagaccacgtcgccgaccagcttgccgtcatcctggcggttgatgcccacatcgataacgatcgcgccttccttgatccattcacctttgaccaggcccggcttgccggcggcaaccaccaccaggtcggcgcggccgacgtggccggcgaggtctttggtgaaacggtgggtcacggtcacggtgcagccggccagcagcagttccatggccatcgggcggcccacgatgttggaggcgcctacgaccacggcgtcgaggccatacaggtcgacaccggtgctttccagcagggtcatgatgcctttcggcgtgcaggggcgcagcagcgggatgcgctgggccagccgaccgacgttataagggtggaagccgtcgacgtctttgtcggggcggatgcgctccagcaacttggaagcgtccaggtgttcgggcaacggcagctggagcaggatgccatcgatggccgggtcgtcgttgagtccgtcgatcaggtcggtaagggcctgctgggtggtctcggaaggcaagtcataggctttggaaataaagccgacctcttcacagtctttacgcttgtgcgagacataaacctgagaggcaggatcgctgccgaccaggatcaccgcgaggccgggcgtgcgcaggccgtgctggctgcgctcggtgactcgtttggcgatctgctggcgcaggctggcggcgattgatttgccgtcgataagttgtgcagtcattacgcgtgattaaccatcgagagggggaagaaaagtgcgcgcattctcgcacgccaaggcgtgagggcaaaggcgcttggtctgcaaattgccctaaccccttaaataaaatgaatttttttcaaaaaagatttgacgggtttcaggggcatctatactattcgtcgcacttgtcgggcacagcctagcactggttaagaaggccgagcacaattgttgtggtgcgaggctggaaagcacttagtttgtaatcctccaagagtacagattaataaggcgcccgtagctcagctggatagagcatccgccttctaagcggatggtcgcaggttcgagtcctgccgggtgcgccattaggcagctttggcacaagtagcgttagatggtgggcgtagctcagttggtagagcacgggattgtgactcccgttgtcgagggttcgatccccttcgtccaccccatattttaaaaggcgccagattaatcgtctggcgcctttgctttaagagcttcaagcgcggatgtggtggaattggtagacacactggatttaggttccagcgccgcgaggcgtaagagttcgagtctcttcatccgcaccaatcaagtttcatccagcttcagggttgaatgaaaccagacaaggaagatgttcgagttccttgttgatgcaagatggtgggcgtagctcagttggtagagcacgggattgtgactcccgttgtcgagggttcgatccccttcgtccaccccatattcagaaaagcgccagatcaatgatctggcgcttttttttgcatccgaaaaataccctgcctcgtatgtattcgcgaggatggccttggacgggcctggatcctcatcgggcgttaccgtcgagggcagtgaaatgtttgcacgacaacagggtgaaagtcgggagttgatcggcgctgaggcgcacttgctggggcgactgatgaggggggatcaggctgcctatagcgagatggtcagcagctatcaaggtgcgatgcgggcagtggcatcggcgattgcggggcgccggcatgtcgacgatgtagtgcaggacgcttggctggcggtggtcagggggttgagtgggtttcaggggcggtccagtctcaagacgtgggtgctgacgataacggccaatcaggcgaaaggccgttatgggcgaagtcgtcgtgatggcgtgtttgagggcggctcggatgacggtggcttttgtgcggtcacggggcagtggttatcggcgccctccggctggcacgaggacacgccggaagcgttgctgagtgaaaatgagttgcgcgaatgtattgagtgcgcgctggaggagctttccgagcttcaaagcggcgtactgttgttgcgcgagcgcgtggggcttgagttggacgaggtggccgagttgctcggtgtcagcctgtgcaatgcgcgcgtgttgctgcatcgggcgcgcattcgtgtatttgcggccatcgacaggtatcaggcgtgcggtaactattgacgtcaagaaaaaacaagcattctcaatgccttggcgttagaatcgttgccggttttgagcgtgtggagctgatccggagccatatccgagtcagtgcgctatttagatagcgaattacggcgcagtacctgtaaggggctgtgccgtttttgtttaagcgttttgaattttcagggcagggcgtttcatcgtatttgtgtttctcgatgctgctgccgtgtcctccggccttgttcgcacggctggtagtcgagggcgtgcatccaggctcttctatatatagaaggcttgatgcagagcctcggcgtgttgagctgtatttgctaacgggatgaggtgcatgcgtgcacttgaacctataaatggcctgctgtttttctacccgttttcagtagggtgacttcttgagtttgacccactagaatgcatgcccttgattctggggtcggaaacggccggctaacgtctgtgcaacgaggaatatccatgcaagtttctgttgaaaatactactgctatcgagcgccgcctgagcatcaccgtgccggcagagcgcatcgagactgcggtcaacaagcgtctgcagcagactgcccaaaaggccaagatcgctggtttccgtccaggcaaagtgccgatgagcgaaatcaagcgtcgtttcggcgctgatgcgcgtcaggatgctgtaggcgacgtgatccaggcttccttctacgaagctgttgaagcgcaaaacctgaagcctgccggtcagccttcgatcgagccaaaatccctggaagccggcaaggacctggaatacgttgccgtattcgaagtgttcccggaattcgaagttgccggttttgacggcatcgccgttgagcgcctgagcgctgacgtggctgatagcgacctggacaacatgctggaaatcctgcgcaagcagaacactcgtttcgaagtggccgatcgcgctgcccagaacgaagaccagctgaacattgatttcgttggcaaggttgacggcgaagtcttcgctggcggctccgccaagggcactcagctggtgctgggttccaaccgcatgatcccgggcttcgaagatggcctggttggcgccaaagctggcgaagagcgtgttctgagcctgactttcccggctgactaccagaacctggacctggctggcaaagccgccgagttcaccgtgaccgtcaacagcgtttccgagcctaagctgccagagctgaacgaagagttcttcaatcagtttggtatcaaggaaaccggtatcgacggcttccgcaccgaagttcgcaagaacatggagcgtgagctgcgtcaggccatcaagtccaaggtcaagaaccaggtcatggacggtctgctggctgccaacccgatcgaagtgcccaaggccctgctgtccaacgaagtggatcgcctgcgcgttcaagcggttcagcagttcggcggcaacatcaagcctgatcaactgccggccgagctgttcgaagagcaagccaagcgccgcgttgtgctgggtctggtcgtggcggaggtggtcaacaagttcgacctcaagcctgacgaagaccgcgttcgcgaaatgatccaggaaatggcctcggcctaccaggagcctgagcaggtcgtggcttggtactacaagaacgaccagcaactgaacgaagtacgttcggttgtgctggaagaacaagttgtggatactgttctgcagaaggctaaggtgaccgataaagcggtctcttacgaagaagcagtcaagccggcggaagcagcacaagccgactgattgtccaactcgttggaaattcaaccataagccagcctcgcgctggcttatgcgttttcaagacatgactatttgggagtaactgcagagcatgttccgtaattcctatattcagcagaactctgatatccaggccgctggcggcctggtcccgatggttgtcgagcaatctgctcgtggcgaacgcgcctatgacatctactcgcgcctgctcaaggagcgagtcatctttctcgtcggcccggtagaggactacatggccaacctgatctgcgcgcagctgctgttccttgaagcggaaaacccggacaaggacatccatctctacatcaactccccgggcggttcggtcactgcaggtatgtcgatctacgacaccatgcagttcatcaagccgaacgtgtcgactacctgcatcggccaggcctgcagcatgggcgcattcctgctcactgccggtgctgaaggcaagcgttactgcctgcctaactcgcgcgtgatgattcaccagccactgggcggtttccagggccaggcgtcggacatcgaaattcacgccaaggaaatcctgttcattcgtgagcgtctcaacacgctgatggccaagcacagtgggcataccctggaagaaatcgagcgcgacaccaaccgtgacaacttcatgagcgctgaagctgcccgtgattacgggttgatcgacgcagtgattgacaagcgccccgcttaatacaagccgctcaaaataaggcgggtcggcgtgtccgaccaccggcgggcttgaaaaagcccgcataagccttcatcttgtgttgcaagcctatcggatttggatcgaacgaatgactgacacccgcaacggcgaggacaacggcaagctgctctattgctccttctgcggcaaaagccagcatgaagtgcgcaaattgattgccggcccctcggtgtttatctgcgacgagtgcgtcgacctgtgcaatgacatcatccgcgaggaggtgcaggaagcccaggccgagagcagcgcgcataaattgccttcgcctaaagaaatcagcggcatccttgaccagtatgtgattggtcaagagcgtgcaaagaaggttctggccgtagcggtgtacaaccactacaaacgcttgaaccagcgtgacaagaaaggcgacgaagtcgaacttggcaagagcaacatcttgctgatcggtcctactggctcgggtaaaaccctgctggcagaaaccctcgctcgtctgctgaacgttccgttcaccatcgccgacgccaccaccctcaccgaggccggttacgtgggtgaggacgtcgagaacatcattcagaagctgctgcagaagtgcgactacgacgtagaaaaagcccagatgggtattgtctacatcgatgaaatcgacaagatttcgcgcaagtccgacaacccgtcgatcacccgggacgtttccggtgaaggcgtgcagcaggccctgttgaaactgatcgaaggcacggtcgcttccgtaccgccacaaggcggccgcaagcacccgcagcaggaattccttcaggttgacacgcgcaacatcctgttcatctgtggcggtgcgttctccgggctggaaaaagttattcagcagcgctccacccgtggcggcatcggtttcggtgcggaagtgcgcagcaaggaagaaggcaaaaaggtgggcgagtccctgcgtgaagtcgagcctgacgatctggtcaagttcggtctgatcccggaattcgttggccgtctgccggttctagccacgttggacgagctggatgaggctgctctgattcagatcctcaccgagccgaaaaacgccctgaccaagcaatatgccaagctgttcgagatggaaggtgtagacctggaattccgtaccgacgcactcaaatcagtggccaagcgggcactggagcgcaaaaccggcgcgcggggtctgcgttcgattctcgaaggcgtgttgctcgacaccatgtacgaaatcccctcgcagtccgaggtgagtaaagtggtgatcgacgaaagcgttatcgaaggcaagtccaagccactgtatatctacgaaaacagtgagccgactgccaaggctgcaccggacgcgtaagcgttttgcagttgcagtacaaacaaggggcctttcggggccccttattttttgagccgggttttggggcggcttttaaatttgcgtttattcatgcgtttaactgctggcattgagcttgttttttttgcatgcagcccccatcttggtttcaagctaatttttcaactgtcatagaggcgaaatcatgaagacaaccattgaattgcctctcctgccgttgcgtgatgtcgtcgtttatccgcacatggttatcccgctgttcgtggggcgcgagaagtctatcgaagccctcgaggccgcgatgacgggcgacaagcaaatcctgctgttggcccagaaaaaccctgctgatgatgatccgggcgaagatgccctgtatcgcgtcggtaccatcgccactgtcctgcaattgctcaagctgcctgatggcaccgtcaaggtgttggtggaaggcgagcagcgtggtgcggtagagcgcttcatggaggtggatggtcacctgcgcgccgaagtggcgctgatcgacgaagtcgaagcccctgagcgcgagtccgaagtatttgtgcgcagcctgctctcgcagttcgagcagtacgtgcagctgggcaagaaagtcccggctgaagtcctgtcttccctcaacagcatcgatgagcccagccgcctggtcgacaccatggccgcgcacatggcgcttaaaatcgagcagaagcaagacatcctcgaaatcattgacctgtcggcacgtgttgagcacgtgctggccttgctggatggcgagatcgacctgctgcaggttgagaagcgcatccgtggtcgcgtgaagaaacaaatggagcgcagccagcgcgagtactacctgaatgagcagatgaaggccattcagaaagaactcggtgacggcgacgaaggccataacgaaatcgaagagctgaaaaagcgtatcgatgccgcaggcctgccgaaagacgccctgaccaaagccaatgccgagctgaacaagctcaagcagatgtcaccgatgtcggccgaagccactgtggttcgttcctacatcgactggctggtgcaagtgccgtggaaggcccagaccaaggtgcgtctggacctggcacgcgctgaagacattctcgacgctgaccactacggcctggaagaagtcaaggaacgcatccttgaatacctcgccgtgcaaaagcgtgtgaagaaaattcgcggccctgtgttgtgcctggttgggcctccaggtgtgggtaaaacctccctggccgagtcgattgccaacgccaccaaccgtaaattcgtgcgaatggccctcggtggtgtacgcgatgaggcggaaatccgtggtcatcgccgtacctacatcggttcgatgccaggaagattgattcaaaagatgacaaaagtgggcgtgcgcaacccactgttcctgctcgatgaaatcgacaagatgggcagcgacatgcgcggcgatcctgcctcggcgttgcttgaagtgctcgaccccgagcagaaccacaatttcaatgaccattacctggaagtcgactacgacctgtccgacgtaatgttcctgtgcacctccaactccatgaacatcccgccagcgttgctggaccggatggaggtgattcgtctgccgggttacaccgaagacgagaagatcaatatcgccgtcaaatacctcgcgcccaagcagatttcggccaatggcctgaagaagggcgagatcgagtttgaagtcgaaacgatccgcgacatcgtgcgttattacacccgcgaggccggtgtacggggccttgagcgccagatcgcgaagatctgccgcaaggcggttaaagagcatgcactggaaaaacgcttctcggtgaaggtcacggccgactcgctcgaacatttcctgggcgtgcgcaagttcagctacggcctggccgagcagcaggatcaggtaggtcaggtgactggtcttgcatggactcaggtgggcggcgagttgctgaccatcgaagccgcggtgatccctggcaaaggccagttgatcaaaaccggttcgttgggggatgtgatggtcgagtccatcaccgccgcgcaaaccgtggtgcgcagccgcgccaagagcctggggattcccctggacttccacgagaagcacgacacccacatccacatgccggaaggggcgaccccgaaagacggccctagcgccggtgtaggcatgtgcacggccctggtgtcggcattgaccggcatccctgtgcgcgccgatgtcgccatgaccggggaaattaccctgcgtggtcaggtattggccatcggtggtctgaaagagaaattgcttgctgcacaccggggtggtatcaagaccgtgatcattcctgaagagaatgttcgcgacttgaaagaaattccggacaatatcaagcaggatcttcagattaaaccggttaaatggattgacgaggtcctgcaaattgcgctgcaatacgcgccggagcccttgccggatgtggctccggagatagtctcgaaggacgaaaaacgcgagtctgattccaaggaaagaattagcacgcattaatgcgattaagcctgggggcttccttgacagctttttagagcccttgttataaagcggctcttaagtgtctgtaggccattcagcactggtttttgctttcaccaaaaaacttagaatcatactcaatagatatataaggggacttagagtgaacaagtcggaactgattgatgctatcgccgcatccgctgatatcccgaaagctgctgctggccgtgcgctggacgcagtaatcgaatccgtcactggcgctctgaaggccggcgactccgtagtactggtaggcttcggtactttctctgtgactgatcgcccagctcgcactggccgtaacccacagactggcaaagcactgcaaatcgctgctgccaaaaaaccaggtttcaaagccggtaaagccctgaaagaagccgttaactaagcttcgttcaagccttgcctacccgggccggacgcaagtctggcctggcagcggagcggcagctggcccgtgtatccatcgggcgccagggcctggggtgtgggttcaaacccccgtccgctccgccagttacgagaaggcgcatcctcggatgcgcctttcttctatccggactctacccacgctccacggttgcctaatttttgaagatcaaccgtttctgggggacgcatgctgcaaaatatcagggacaattcacaaggctggattgccaagaccattatcgggatcatcgtcgcattgatggcgttcaccggtatcgaggccattttccaggcttcgaccaacaacaagcaggacgtggccaaggtcaacggtgaagagatcactcaaaccgaattgagccaggccgtcgacatgcaacgccgtcagctgatgcaacagctgggcaaggatttcgatgcttcactgctggacgaaaaactgctgcgcgatgcagccctcaagggcctgatcgatcgcaagctgttgctgcaaggtgctgcggattccaagttcggcttctccgaagcggcgctggatcaagtgatcctgcagacaccggaatttcaggtggacggcaaattcaatgccgagcgctttgaccaggtgatccgtcaactgggctacagccgcatgcagttccgtcagatgctgactcaggaaatgctgatcggccaggttcgcgcaggcatcgccggcagcggtttcgtgactgacgccgaagtgctggcattcgcccgcctggaaaagcagacccgcgatttcgccaccgtcaatatcaaggctgaccctgcggcggtgaaactcaccgacgatgaggtcaaggcttactacgaccagcacgccaaagagttcatgaccccggaccaggtggtcattgactatctggaactgaagaaggcctccttctttgaccaggtcaccgtcaaggatgaagagctgcaggcggcttatcagaaagaaaccgccaacctcgctgaacagcgtcgtgccgcgcatatcctgattgaagtcaacgacaagaccaccgacgcgcaagccaaggccaagatcgaggaaatccaggcgcgcctggccaagggtgagaagttcgaagccctggccaaggaattctcgcaggatccgggttcggccaacaatggcggtgacctcggtttcgcaggcccgggcgtctacgatccggacttcgaaacggccttgtacgcgttgaaccaggatcaggtttcggccccggtgcgtaccaccttcggttggcacttgatcaagctgttgggcgttgaggcacctcaagtgccgacgtttgccagcctgaaagacaagctgacccgtgagctcaagacccagcaggttgaacagcgctttgtcgaagcaaccaagcaattggaagatgcggcattcgaagcgtccgacctggctcagccggcgtccgacctgaagctgaccgtacacacctccgcgccgtttggccgtgagggcggtgaaggtgttgcggccaaccgtgccgtggtcactgctgcgttcagtccggaagtgttggatgagggtgccaacagcaccgccatcgaactggacccggaaaccgtcattgtgttgcgtgccaaagagcatctgaagccttcgcagttgccgctggaaagcgtatctgccgcgatccgcacccagatgaccaaagagcgtgccagtgcggctgccaagactcacgctgacgagctgatcgccagcctgcgtgatggcaagaccccgctgaaccagccggttgatggccaggcctggaaagtcaccgaagccgctacccgtagcgccgaagcgatagaccctgccgtgctgcaagccttgttccgcatgcccaagcctgcggccaaggacaagccgaccttcaccaccgtgaccctggctgacggaagcctggtgatcgtgcgcttgaatggtgtgaacgaggcggctgcgcctacggatgaagaaaaggcgcaataccgtcgtttcctcgcttcccgtattggccagcaagactttgctgcgttccgcaagcagttggaaaccaaggctgacatcaagaagttctgatgtcggtttgaaatcaaagcccccggcctgaaaagcccgggggcttttttatgggcgctgtcccgtcctgaataaggtttacgccttctgacctatcttcaggaggagtcaatggattcgggcaaaaggcgaagccgcactgcgcttatctgttagccagccgcacatccattttcggcagcaagaatcggagtgcgagcacatttcgaagcctcttacgatgagactccaaacctggaggagtccacgctggctgcgtatggctggccttttccccttaaccactccaacaactttttggattgccgggcatcagctatgcaattctcgaatctttttgagtcaacgaacggcgctggaggcaacccatgaaattacccgattatgttcgactacttgcgctggcagccatctggggcgccagtttcctcttcatgcgcatctcggcgcctgttttgggcgcattgccgactgcattttttcgcgtgttgttgggcgctatcggcttggccgtcattcttgccatgttaaaaaccaacgtcgacttcaaaggcaagctgcagcggatcatggtgttgggcgttatcaattcgggcatcccgtttttgatgtatagcgtggcggcactgctgttacctgccggctactcagcaattttcaatgcgaccacaccgatgatgggggtcttgatcggttggatgtgtttcagcgattcgttgacactgaaaaaaggtgccggcgtgttgatcgggcttatgggcattacgttgctgaccagcactggccccgtcacactttcaatgaccgtggtcatgggcgcgttggcgtgtttggtcgccaccagttgctacggtgcagcaggatttctgactaaacgatgggtcgctgacaagggtgggctggacgcgaaactcgtcgcttttggcagtcagatcggcgcaacgctgtttctcgtaccgtttttcggactatcaaccgccataaaccctccggcgagctggggtaacccagaggtctggatagcactgattgcgctgggtttcatctgcacggcttgtgcgtacattctgtactttcgcttgatcgcggatatcgggccggtgcgttcgctgaccgtgaccttccttatccctcccttcggtgtgctgtggggggtgatgttcctgggtgaacgcctttcggccgcgcatttgtacggcggcgggcttatctgcttagctgtatggttcgttctcagcaagagcgcgccgaagcaagaaccctcgccagcttcggattaatccatcaacttacctgccctcagcgatttctcatctgatgggctaagtgaataccttgtcttggtctcgcggcacctggtagatggcttcgccggacggatacgaagaaggagcttcaaacgtgctgattcagggaatggctggctgggttatccgtcgcgcgagtgtggcggatgcgcccgctgtgcttcaggtgtttgatcaagtgatcggctggttcgtggggatgggcaatcaaggccaatggggcaccgaaccctggtcgggcttgcctgaacgcgttgcgcgggtgtctgaggcctgctcgatgccggacgcgtgggtggtggaagaccctgagggctgtattcagggcgcactcgtgctgggtgaaccgatgccttacgtgccttcggcgacggagcccgaggtttatgttcggctgttgatcactgcccgaggtgagcgcgtacggggtgtcggccggcgtctgatggcctttgccgatgatcgcgctcgggctgcgggggtaaagcgtttgcgtgtggactgctatggaggagggagtggcgctttggtccgcttttatgagtcctgtggttatgagcgaatttcaaccttcgacgtgctggggtggccggggcaattattggggcgcagcctgtgatgccaccggccggggctttactcagcgcaggtgccgggcttgcgccgtgatcagcagggcaggcaccagcaagccaatcaccgcccaggcaaatgaacccacgcccagcccttgcaagagcaggccgccggccaatcctccaccggcaatgcccaggttccagacggtaaccagcatggactgtgccgcatcggccgacgggccggcggatttggccagtgctgtttgcagtaatgccggcaagccaccaaaggccaggccccaagccgccacggtgatgtagatgactgccggtgagctgatccacaacgccagcgccagggcagaaagggcaaacagcgcgcaactaatcagcagcagcacacgtagccatcgatcaatccacacaccggtgagccagatgctcagcaaggcagccaggccaaacaccagcagcactcggtcgatatccgcagcgatcccggcgggcaccagcaacggggcaatgtaggtatagagaatgttgtgggccagcacgtaggtcaaggtcacccacagcaccggacgaatgcctggcaacctcagtacttggcgcagccccaagcgtttttctggcggctcaccggcgaaatccgggagctgccagcgcgcccaaaccagcagtagcagggtcagcccggtcatgatcgcaaagctcaggcgccagccgacggcagtgccgagaaaggtcccggcaggtacgcccaaggacaaggccagcggtgctcccagcatggccacggcgattgccctgccttgcaggtggggcgcaaccattcggctggcataccccgcgagcagcgcccaaagcagcccggcaaacacgcctgcgaagaagcgcgccaccaacgtcaacccgtaatggctcgacagcgcggtcacgctgttgaccaaggcgaagccaccgatagcgaccaacagcaacggccgccgccgccaactgcgggtccacagcgtgagcgggattgccgccagcaacgatccgagggcgtacagcgtgaccagttggccaaccagtgctggcgaaacgccaagccctacgctcatttgcggcagtaacccggctggcatggcctcggtgagaatggtgataaacccggcgcacgccagggccaacaagccggccaggggcagcgcatcctgtcgggtggtgggtgcggcttgggcaagggaagggcagtcgctcatgttctgtgtccatgcaaaaaggcgaggaggcagaataggaggctgtgggctgcggaaaaacaggctaaggttccgaacttagcggatgtttgtgtccgtaatgatcaaggggcagggcatggacagtctgggcagtctttcggtgttcgtgcaggtcgcggaaacccgtagttttaccgctgcgggccgggtgctgggagtgtcttcgtcggcggtgggcaaaagcatcgcgcgcaccgaggcgcgcttgggcgtgcgcctgtttcaccgcagcacgcgcagcatcacgttgacagccgaaggcacactgttcctggaacgttcgcgacggattctcgccgaggtcgaggcggcggagcaggagttgactgaagccagcgccacgccgcgcggcaagctgcgtatcagcctgccgcaagtgcgtggcctgttgatgcctgtgctcagcgactttatgcgcgcttacccgcagatcgaactggatgtggatttctccgaccgcatggtggacgtcatcgaggaaggtttcgacgcggtgattcgcactggcaagccggaagattcacgcttgatggcgcgccacctggggcattaccggctggtattggtgggcacgccgcagtacttcgctcactatggcaccccgcaacaccctcgggacttgagtggtcacgcctgcctgcgccacaaattctgcgccaccggcaagctggaaccctggccgttgcgccacgtggctggcgccacagagccggtgttgcgtgcgccattggtcagcacgaccatcgaatccctcaaccatgtggtgcacgaaggcttgggtatcgcctgcctgccggacttcatggtcaatcaggccgtgcagcaggggcgcttgcagcgggtgctggatgatcacctcgaacaccaaggcagcttctggctgctctggccatcgagccgtcacgcgtcagccaaactgcgggtgtttatcgaccatatgtgtgccaggctttttcctgcagtccccgcctgataagcctgtgacgttttaccgacaggaatgcgcgcgccaagccctcgttctgttgcacaataccgcccggaccgttttcctcaggattttcaatgtcgacatcatttcacttgcgtagcctcgggctggcgctggtgctggcgggcgccgcgggctgctcgtcacccaagaccgctatttatgaacatgaaaatttcgacgactccggcacgttttcccgtgattaccctgtcagcgatgtggctgcgtgtgaagcggcccgtcgtgcgttgctgagccagggttacatcatcaccagcagcgatccgaaactggtggtgggtaacaagagctttcagcaaaccggcgaaacccacttgcagatcagcttcaacgtggtgtgtgccgctgatggcagtaaaggctcgaaccattcaacgatgttcgccaatgccttgcaggatcgttacgcgctgaaaaaggtcaacaattccgcgagcctgggtgtgggcgtactggggtcggtatcgatgccgatcggctctaccgacgactcgatggtcaaagtggcgagcgagaccgtctcggcgccgaagttctatgaccgttacttcgcgctggtggatgtgttcctgccccaggaagtgaaaaaggccgagcatattcccgagaaacccaaggcggaactgggcgtgccggaacccaaggtggctccggcagccgagacggtcgaggcgccaaaggcagaacccgcagcgcctgccgtttcgcagccagtcacgccgccgcctgaagccgcgccgattgccccgcaagcggaaccggcgcctgctgcgacgccagccgttgaacctgcacctgcggcgactaacccggcattgccggcgccgacagaggcgattccacccctgccgacgcctgcgcagtaattcagaccgctacggggttcgccttgtcgacgtttatcccgtagcggctgatggcttcactgactttttcgcggccaaccacgccgtcatctgccagcgccttcagggccgccagcacgataaagtgccggtccacttcaaagaactcacgcaaggtttcccgggtatccgattgcccgaagccgtctgtgccgagcgccacgcagcggcggttgtgcacgaaagggcgaatctggtcagcgaacagtttcaggtagtccgtcgcaatgaccagcggccccgtcttgccatcgaggcactgctctacgtagctcatgcgcggctcattttccgggtgcagcaggttccagcgttccacggcgtgcccgtcgcggcgtagttcggtgaggctggtagcgctccatacgtcgctttgcaggttgaaatcgctgtgaagcaattcggctgcagcgatcacctcgcgcaggatcgacccgctgcccatcaattgcacctgtgcttgctcgctgccgctcagccggtacatgccttttagaatgccggtttccacgccctcgggcattgccgggtgcgggtaattctcgttgagcagggtgatgtagtagtaaatgtcctcctgctcgacatacatgcgtcgcatgccttcgcgaataatcaccgccagctcgtaggcaaatgtcgggtcataggacacgcagcatggaatcaccgacgacaggatatgactgtgcccatcgtcatgctgcaagccttcgcccatcaaggtagtacgcccggctgtagcacccagcaggaagccgcgcgcccgggcatcaccggccgcccaggccaggtcgccgacgcgctgaaaaccgaacatggagtagaaaatatagaagggcacggtcatcaagccatgattgctgtaagacgtgctcgccgcaatccacgaggaaatggcgccggactcgttcagaccttcctgcatgatctgcccgtccttgctctctttgtagtagctcagttgcccggcatcctgcggggtgtagagctggccgactgcagaatgaataccaatctggcggaacagactttccataccgaaggtgcgcgattcgtccggcacgatgggcacgatcagtttgcccaggtgcgggtctttgagcagggtgccgaggatgcgcacgaaggccatggtggtggagatggcgcggtcgccggtgtcgttgagctgggtggagaaaacgctcagttcgggaatgcgcagcgatgctacggcgctgtggcgcgccggtacatacccgccgagggcttggcggcgtgcggcaaaatagcgggcctgcacactgtcggcggtgggtttgaggtaggggatttcgtcgagctggtcatcggccacgtccaggttgaaacggtcgcggaaggcttttatcgcgtcggcacccatctttttgagctggtggttgatgttctggccttccccggcctcacccatgccaaagcctttgacggtcttcgccagtatcactgtgggttggccacggtggcgtgcagcggcggcgtaggcgttgtagaccttgtccgggtcatggcccccgcgtgagagtttccagatttcgtcgtcggacatgtccgcaaccaatgccagcaactccgggtatttaccgaagaaatgttcgcgcacataggcgccgttctgggacttgtagttctgatagtcgccgtccacacattccatcatgcgttggcgcaacaggccgctctggtccttttccagcagtgcatcccagccgccgccccagatcaccttgatcacattccagccggcggcgcggtacaggctttcgaattcctgaatgaccttggcgttgccacgtaccgggccgtcgaggcgttgcaggttgcagttgaccacgaagatcaggttgtcaagtttttcacggccagccagggagatggcagccagggattccggctggtccatctcgccatcaccgaggaaggcccagaccttgcggccctggtggggtttcagctggcgaaattccaggtagcgcataaaccgcgcttgataggccgcagtgatcggccccagccccatggacacggtgggaaattgccagaagtccggcatcaggcgcggatgcgggtaggacgacaagccttcgcccccggcctcgcgccggaaattgtccagctgggcttcgctgatgcgaccttcgaggtaggcgcgggcgtaaatgcccggcgaggaatggccctggatatacacgaggtcgccgtcgaagctgtcggtacggccacgaaagaaatggtcaaaacctacgtcgtacagcacggcggctgacgcataagtcgcaatatgcccaccgacgcccgagtgtttgccggcacgcagcaccatcgccatggcgttccagcggataaacgcattggtactgcgctcgattgccaggtcgccgggatagggcagttggcggtccacggcaatagtgttgacgtaaggggtggtcacccgcccgtagaagtcgccatggcgcgcaacgtcgaaatccagcaactgatcaatcaggtagtgggcgcgcggacggccttcggtggacagcaccgattcgatggactcaagccactcgcgggtttcctgtggatcgtcatccagtcttgctgcgttgttcggggtcatgtggggctccagggtcggtggatttcaagcggcgtgctccttgtgggagctgtgccaatgtagttgcaattgcaactacatgcctgaatctagcgcgggatgagctactattgcaaccttcttgaaattccccggatggtgttgcatgtcgtcgaaagagcctgatgtatggttccgttttgtcagggcccacaggacggtcatccgtgaaatcgaacgccgcctggccgacgcaggcctgccgccgtatgcctggtacgacgcgttatggggcctggaaagcggccccgaaggtacccgccgcatgcacgaattagcggatgtgctggcgattgagcgttacaacctgacgcgtctggttgatcgcctggaaaaggacggcctggtggagcgttcgcgttccgacggcgatggtcgtgcggcgtttgcctcgattaccgatgccgggcgggtattgcgtaaaaaaatgtggaagatttacgaaagcacggtggatgagttgttcctgtcgcagattgagccggagcaccgccaactgtttgccgatacgctggagcgtacggcggggttggcgatggatgcctgtgtgcagacccgaagccggcgcaaaacctgaagagcaaggaagattcaatgtgggagctggcttgcctgcgatggctgcccataggcactgttgtacagtttgacaggccgcaatcgcaggcaagccagctcccacagttgatcgtgttccaacccattaaagtcgatacagggccagcgcttcctctacctgccgggtacccatacgtccctcatccgccaacgccctcagtgccgacaccacaatccaataccggctcggcgcccccgcctgcaccgaaccggcccccagcgcgacaaagcgcgcatccacgtatcccgccaactgatcgacaatcgcttgcgggtacccggttacagccaccaccggcgtcacggtaccggccaggcaatcacgtaaatggcagctgcgtttcggcgccacggggtgcaagcgattccagcgttcagcgctcgcagcctcgcgggccaaacgggtatagctggggcaactccagagctgcgccgtgactttccaatcctgctcaagcaatcgcgcggcctgcacgacttcctcaaaggcgcgtcctgcgccgagcaaccgcacggagcccgcgtgcccccgccgtatcggatacatgcctttgagcgcgtcctcacagtcttgcgcattcaaatgcattccattgtcccggtcatgcaacgctaggtaataaaaaccgggtttgctgtcgacatagagcgcgcgcagcgccgccagcacaatggcccgggtttcctcgccggatgccggatcatagggcgtgcaatgcggatggctggccagccaaagcggcagcgacggttgggttcccttgggccaaggcgacggttggttttcgatggcattgcacaggatgccgcgttgcgcggtctcggccgagagtgcgcacaattgcaccgaagattgcgcgttgtgcagatacagcagcggtttttcgggggtattgcgtgcgaaccaactgggccaggtgcccgctcgccgtgagcgtgacaagcctcttatcacccatgcctgtcggctggactccagggtgtcggcgatcgccatgacggtggacagcggcgaactgcgctgcggcccggccgcgttcaacgcatcgatacaacgctgcgcggcgagggtggagagggtggtcattgggagtgggcaccgtggctacgaatgcccataccctaatggaaatctgtatttgattgcaattgcaatgattgcaatcgcgcctcgaggccaaggtgctaaatcaccgcaacgctgctacgtttaatctgcaagtgcaggaacgtcatggcgccgacattttttcgtcatcacggcactttaggctgagtttgcaggtcatttacttgcaactgcttttaacagataaggagtccaccatggacgattaccaggaagaactgctggagtaccacgcgtttgaaatggatccactggatccggctgatgacgccaccgagctgtaagaccgacttcaggcggaatgccgctgactgcggcgaaattcccctggggtctggttgttccaccgcctgaacgccctttgaaaggcctgggctgaagcaaaaccgagcaagtaggcgatttcgccgaacgccagttccgtgtcgcgaatgtaggtcatggccaagtcgcggcgcgtatcgttgagaatcgcgcgaaactgagtgccttcgtcggccagtttgcggcgcagcgtccaggtcggcagcttcaagcgtgccgccacttcttccaggtcgggttcccggccgccattgagcatcggcccgagcaaccgggtaatgcgctcgcgcaggctgcgggtgcgggtgagctgctccaactccctttcacacagctgcaacaacaggtgccaggtgcttgggcagtgctgtgggttgcgcagggccagggtcggttggttcaggcgcaattggttggcggcggcgccgaaatgcaccgggccgtcacccaatacgctgtagtgctcgctgtactgcggcgcttcaaactcaatctcgatgcgctgcgcttgcaggggttgttgggccaggctcgacagttggtgcagccagccggcgatgatcgaatccaccacaaagcggttgtaggcgttgtacgggctgatggagtagaaccgcagccaggcgccctcggcgtcttcatgaaaactcgactgcccgcgatagttggagccgtacagcgcttcaaagcgggtcagtgtgcgcgcggcttcacgcacgttgggcgcttgcgcggccgtcacgccggccagcccggcctgactcaaacggctgagttggcccatgcgcaggcccaggctcgggtcgccggtgagctggatggccgcgtggcccaggcgcatatagcgtgggatcgataaccgtgcgccggcttcggcaaggcgcgccgggtccaggccgtattgcagcagcagcggttgcgggtctataccgtggctatgaatcgcatcggccagggcttgcacaaagcctaccgacaaatcccccaggcgcacgggcttcaaggcgttacaaccagatattcagcaagcgcgcgccacgggcatcgctgtcggcggtgacttgcccgttgctgctgagaaagctgtggccggcggtgcccaggtcccagaactgcccgcgcaggaacacgctcatgccggccgtcgcgtgactgatcggttgctggctgatcaacgtgagtcggcgccaggcttcaccttcgctgagttcttcgggtttgaggctgatttcagtgggcgtggacacacttttaaagccgcgccatgggcggtcccaggtgtcgcggcccgtcacgagtgccggtactgcaaccaactgcgcgcctctctcgttgagcttgcggtagttgtccgggtaccagctgtcactgccgatcaggatacccaggcgcccggccggggtgtcgaccacgctgacgatgttttcatcgcccggctcgataaagccgcgctcatcgtagatgggataaaactggcgctgcggctgacccaccggcaaaccatcggcaccaaataccaggctggcgttgtacagcgcgccatggccgatctgcaattgcccgtcgtttacgctggggtcgggcagggcgatggaaccggctacgagggtgacgccgaactctttggccaaaccgccgaacagcaactggtagtcacgggccatggcgggggctttcatgcgcaggtaggcgtcgtccatgcggttatcgccagtggcaccgagccatgcccgcgcaaacaaaaacgggttgctggccgtcagccaattcatcgcgtctttaaggtggatggcctggtacagctcgtttttttcgcctttgagcatcagccacgtgccgatatgttccggcagcacgacgatggttttttcattgatcagcccctggtcgcgagccttttgcaaatacgccgcgagtttcaggtgcaggcgctcaacgctctgataatcggcggggaacagctccggctgaatgccgagcaaattgccgcgatcggccggcacgccttcattgacggccagggtgatacgcaggtccgacaggtaatgcgccacagggcgctcctgggtccagaccagatacgcggcggcgacggcaaccaaggccatggtgagggttaacgctagaagtttacgcatggggcaacagacaacagaccgggtgcagggttcgcggactagggtagggcgcgtggcctgacttgccaaggggcgctgtgcatttggatcaataacttgtgagtttcggtcattgagcggtaggccatcgactcttagtctgtgggacataaaccgatggggtgtcattcgaatgccccacgtcccgtgatgatccgttgtggagctgtaccatgaccgctgctgcctatccgcacctgctggccccgttggacctgggttttaccaccttgcgcaaccgcaccctgatgggctcgatgcacaccggccttgaagaaaagcccggcggtttcgagcgcatggcggcctactttgccgaacgcgcccgtggcggcgtcggcttgatggtcaccggcggtatcggcccgaatgatgaaggtggcgtgtacgccggtgcagccaagctgacgaccgagcaggaagcgcaacagcacaagatcgtgacccaggccgtacacgaagcgggcggcaagatctgcatgcaaatcctccacgccgggcgttatgcctacagccccaagcaggtggcaccgagcgcgatccaggcaccgatcaacccgttcaagcccaaggagctggacgaggagggcatcgagaagcagattcaggatttcgttacctgctcactgctggcccaggtcgccgagtacgacggcgtggaaatcatgggttcggaaggctatttcattaaccagtttctcgccgcgcacaccaaccatcgcaccgaccgctggggcggcagctatgaaaaccgcatgcgcctggcggtggagatcgtcagccgtgtgcgtgaagcggtaggcccgaacttcatcatcattttccgtctgtcgatgcttgatctggtggaaggcggcagcacctgggaagaaatcgtgcaactggccaaggccattgaaggcgccggcgcaaccatcatcaacaccggcattggctggcacgaagcgcgtatcccgaccatcgccaccaaagtgccgcgcggcgcgttcagcaaagtcaccgccaagttgcgcggtgcggtaaagatcccgctgatcaccaccaaccgcatcaacacgccggaaatcgccgagcagatcctggccgagggcgacgccgacatggtgtcgatggcgcgtcccttcctggccgacccggagttcgtcaacaaggccgctgccgggcgtgccgatgaaatcaacacctgcatcggctgcaaccaggcctgcctggaccacacgttcggcggcaagctgaccacctgcctggtcaacccgcgggcgtgctacgagaccgaactcaattatttgccggtcaagcagatcaagaaaatcgccgtgatcggcgccggtcctgcaggcctggcggcggccactgtggcggctgagcgtggtcatcaagtgacgttgttcgactcggcgagcgagattggcggccagttcaacatcgccaaacgcgtgccgggcaaggaagagtttttcgaaaccctgcgctacttcaagcgcaaattgcagaccacccacgtcgagctgtgcctcaacacccgcgtggacgttgaacaactcaaggccggcggttatgacgagatcatccttgccaccggcattgcgccgcgcacgccggccatcccgggcgtcgagaacgccaaggtgctgagttacctggatgtgatcctcgagcgtaagccggtcggcaagcgtgtggccgtgatcggcgccggcggcatcggcttcgacgtgtcggaattcctcgtgcatcagggtgtgtccaccagcctggaccgcgaagcgttctggaaagagtggggcatcgacacccaactgcaagcgcgcggcggcgtggccggcatcaagccgcaaccccatgccccggcgcgtgaagtgtacctgctgcagcgcaagacctccaaggtcggcgacggcctgggcaagaccaccggctggatccaccgaaccggcttgaagaacaaacaggtacaaatgctcaacagtgtcgaatacctgaaaattgacgacgaaggcctgcatatccgtatcggcgccgagggcgagcctcaagtgctggcggtggacaacatcgttatctgcgccggccaggacccgctgcgcgaattgcaggacggtctggttgccgccgggcagaacgtgcacctgatcggcggcgccgatgtggcggccgagctggatgccaaacgcgcgatcaaccaaggctcgcgcctcgccgccgagctgtgagaagagagaaggggcggtgttagactaccgcctcttttttcatgcagatccctcccgatgggtccattcgactggcttccccacgcgccccttgagcccttgcaactggattggctcaagggcgtcgagctggccgtgctgcgcctggaccgcatcgacccgctgatcagcggcaacaagtggttcaagctcaccgggcacctggctcaggcgcaaacagccacaggcatcatcagcctgggcggcgcttattccaaccatctgcacgcgctggcggcagcggggaagcgttttggcttccagaccgtcggcctgctgcgtggccacccgcaaagcacacccactgtcctcgaccttgaatctttcggcatgcagttgcattggctgggttacggcggctatcgcgcgcgccacgcgccgggtttctggctgccctggcacgagagatatcccgagctgcaccctgtgcctgaaggcggtggtggtatcgaaggggcgttgggttgcggggtactggtcgagcaagcccgtgcgcagttgagcggtctgggttgggccgactatgacggatggtggctggcggctggcaccggaaccacgttggctggcttggcgttggctgaggcaggtgcgcgcccggtctacggcgccatggcggtgccggatggtcacggggtggcgcaaaacatagaggctatcgtgagtggcggttatgagctgctggacgctagccgtggcggtttcgccaaggttgacccgccgttgctggacttcatcaacgccacagagcaagcctgtggtttaccgctggagccgctgtataccggcaaggcgctgctggccctcaaagttcagatcgaagccgggcgcttcgctcccggtacccgcctgatctttgtccacaccggcggcctgcagggccgccggggcttcaacgcctgatacacaactctaggtgggagctggcttgcctgcgatggagatgtgtcagtcaatgggttttccgactgacccaccgctatcgcgggcaagcccgctcctatccggcatcatgcgcatcgccgtgttatcgcgcagcacatagtgatgaaccagcgcggccagtgcatgcagcccgatcagccagtaaccgatcttgccgaacagcacatgccagccttcgatctgcttggccagggctttgttttcagcgatcagcggcggcagttcgatgccgtagaacatcacggagtgcccctcggcgctgacaatcagccagcccgcaatcggcatgccgatcatcaaggcgtacagcgcaacgtgcatcagcgtggccaacaggctttgccattgcggcggcgcgggcacgatcttcggcgcaacccccaggcttcgcgcaaacaggcgcagccacaccagtacaaacacggtgaggccgaacatgaagtgcatttcgacgatcagcgtgcgcccgccactgcctttggggaactggccgcgtagctcaatgcaggcgtaaaccaccgccagcagcaccaccatcaaccagtgcaacgcgatcgacatggtgctgtagcgcgtatcggagtttttccacggcatcgctgggttcctcactcatcagggcaaacctccattcttttgacggagttcattaactgtatgccggttttgagcgattcgcctggcacaagtgccgttgttttgacctctgtcagtggctttgcggcatttcaccgcgcgccaggcgtttgttgatgtcgctgatgacggcaggcaggtcgttgatcgtgtcgatcaggtagtgcgggcgtgaaccttcgaacagggcttcgatacgcttgcgctcgctggccagtgtggccgcgtcgagggcgcggaactgttcgtaggtcaggcccagtgcattgccggaacaggtcagcgccacggtccacatccccgcgcggcggccttcgaggatgcccggcacggtgtcgtcgaccttcacgcacgccgccacatcatcaatgcccagcgcgatcacgttggccagggcctgggccggccacgggcggccattcggcacctcgtcggtggcgaccacgtggtcggcgatgtagccgttggtggcggccagggcgacgaccttgtccatcacctgcttggggtagccggagcaagagccgaccttgataccttgcacacgcaggcgggcgatggtgtccagcgcgccggggatgagtgccgaatgctcggcgatcttctcgatctgcaagggcatgaagcgttgatagatcgcggtgacgtcgtcgtccgtgggcccgcggccgaaggccttgcggtagcgctcggcgacttgcggttggtcgcacagcgtacggatatggtcccacttgcccatgcccatcggaccacgtgcctcttcgatggacacttggacgtcgaactcggcaaaggcttcgacaaagatctgcgtgggggcaaacgagccgaagtcgaccacggtgccggcccagtcgaggatcacggcctggagggtgttgggggtttcatagttcatggttgcgatccaaaaggttgatgtgcagtgcgtgcaggacttcagcgatggcggccacggcggcgtgcatgtctgtcgcgtcaacattgccgatgcagcctacgcggaacgtgtcgacctgggtcaacttgcccgggtacagaatgaaacccttggccttgacgccttcgtagaagtctttgaatcggtagcgcgggtcttgcggggcgtggaaggtgacgatgatcggcgcctggatcgccgccggcagaaagctgcgcaggcccagttcagccatgccggcgagcaatgcctggcaattgcgtgcgtaacgcccgtggcgtgcgggcaagccgccttcctcggcgtattgcagcaacgcctcgtgcagggccgcgaccacatgggttggcggggtgaagcgccattggccggttttggccatgtagctgtgctggtcgaacaggtccatcgccagggaatggcagttgccttgagcggcggccagcgcgtgtttggcgacgaagacaaaccccatgcccggcacgccttccaggcacttgcccgaggcggcgatcagcgcgtcgaaggggatttcacgggcatcgatcggcagtgcgccgaaggaactcatggcgtcgatgatcaggcgcttgccgtggtttctcacaacgtgggcgatttccgccagcgggttgaggatgccggtgctggtttcgcagtggatcagcgccacgtgggtgatggccttgtcggcgtgcagcaagcggtccacatcggcggcggtggtggggtggtcctcggcggtttcgaaggtgctgaagtcgcggccaatgacttcgcaaatcttcgccaggcgcttgccgtaggcgccgttgatcagcaccagcaccttgccattgcgcggcaccaacgtgccgatggccgcttcgacagcaaaggtgccgctgccttgcaaaggcacgcagtggtggctgtcggcgccgtggatgatcgccagcaactgctcgcagacgctggccgtgagctgattgaagcggtcatcccatgagccccaatcgacctgcatcgcctggcgggtgcgggccgaggtggtcaaggggccgggtgtcagcaggatgggcgcggcggtggtcatctcaaatcctcgtaaaactggggctgaatctacggcgcctaaattgcagtttggcttgtcatcaatcaaattgtttgttgttatgcgagctatcagtgaggccgatagccatgaatttgtttcaactgcgtgcattcgatgccgtggcccgtgagggcagttttacccgtgccgccacgcggctgtttatcagccagccggcggtgaccgggcatatcaaggcgcttgaggagcactaccagatcccgctgctgcgccggactgcgcggcgagtggagttgaccgaggaaggcacgcgcctggcggccatcacccgggcgatctttggcctggtggatgaggcgcagaccctgctggaggccaatcgccaactgctcaccgggcgccttgaagtggcggcggatggcccgcatctggtgatgccgatgattgcgtggctgcgcgagcgttacccgggcatcacggtgaacctgcgcttggggaacgcccaggaaaccctggcggcgctgttgtccgagcatgcggatgtagcagtgttgaccgaagtggagccgcgcaacggcctgcatctgcaaccgctcggcgaatcaaggatctgcgcgctggtgccggcggggcatccctggctggccgaaccagagggtatctgcctggagcaattgcacgaggtgatcatggtgctgcgcgagcccagctccatcacccgccgcaccttcgacgacgcctgcgccgctgcgggcgtcaaacccagggtgctgctggagctggacagccgtgaggccgtgacggaggccgtcgccgccgagttgggggttggggtggtgtcatcgatggaggtcagccgcgacccccgggtgcatgccattcccttgcagggcgaggggctggtcaaccggcacatgctcggttgcatggagcggcgccgcgcgttacgcctgatccaggcgtttttcgagttggcgtcgtgacggttttttgctggaacgatcttttcctgccctataaactctgcccccaaagcgccggccagtagacgtttcggcgcgatggacgagaagagagtgagtcatgggcgcacagtggaaagtcaaacataaagaagcggcatccaatgccaagggcaagatctttggcaagctggtgaaagaaatcaccatcgccgcccgcaacggcgccgacgttgcgaccaacgcccacctgcgtctggtggtggagcaggccaaaaaagcctcgatgcccaaggaaaccctcgagcgcgccatcaagaaaggcgccggcctcctgggtgaaaccgtgcagtaccaccgcgtgacgtatgaagggttcgcgccgcaccaggtgccgctgatcgtcgagtgcgtgaccgacaacatcaaccgcaccgtggctgaaatccgcgtggccttccgcaagggccaattgggcgcttccggctcggtggcctgggacttcaaccacgtcggcctgatcgaagcctcgccggataccccggacgctgacccggaaatggccgctattgaagccggtgcgcaggatttcgaagacggcgaagaagaaggcgccaccttgttcatcaccgagaccaccgacctggatgccgtgcaaaaagccttgccggagcagggtttcaccgtgctgtccgccaagctgggctatatctcgaaaaacccggtcagcggtttgaccgatgagcagatggccgaagttgaagccttcctagaaggcctggacaaccatgacgacgtgcaggatatgtttgtcggcctggcaggttaaaacgcggtaagaaatgttggagctggcttgcctgcgatagcggtgtatcagtcactgaaagggtgagtgatagggcctcatcgcaggcaagccagctcccacactggtttagtggtgtctgacagaattgagcgccgcttcgatttcttcgaaacccggccgtgccagcacctgcggttgacagcagcgttcctgcagcactttcagcgccgcgtcactcaccccgtcaacccgctccagcaattcccccagcaacaccccgaacgcgcgcacttcaatgcgctgcagcgcctgtgtttccggggtgtccgccgtggcatggaatgacgccgcgccaaaatcccccagcaggcaatcgcccgcttcattccacaagatattgtggccgtacaagtcgccatgggtgatgccgtgccgatgcaaatgcgcggcgaccgaagcgacgccccgtgccatgcgcaaggccacttccaggctgaaacgggtagacggctcgtagacatcccgcgtgcacgacgccaggctcggcaaggccgccaggttgcggtagctcggcgctatcaggtccatcaccagcgcggcctggtcatccgggtggtcgaccacgcggccttccaccttgatcaggttcgggtgcaacccggcggcgatgcaggcctgcatttcgtgcagcggcgagccatcgctggtgatcgtgcctttatacagtttgaccgcgacgggcttggccgcaggcttccacagcgccttgcggataatccccgaagcgccttcgcccagtacctcgcccagttccagttcaggccagggaatatccggcgtcgcgtcatcagccgccacgtccaccgccatttccaccggattgcccgcataggctagccacgtcaggcctggcatcgtcagcagccacggcggcaactgggtgaaacggttggcggcgatgcgcagcaattcgaggttgtggcactgcgccaggcttggcggcaactgggccaatcggttaccggccagcatgagtttttgcagcaacggccgctcgcccagttcatcgggcagttggctgatgaggttgtcggtgaggatcagccagcgcagctgcggcggcagggcggcggcgggtactcggctgatctggttggccttgaagccgatcatgctcagcttttcgcactggcccaagcactccggcagctcggtaaaggcattgtccgaacagaacaacacgcgcaggtgagtcaggcggtgcaggtcgtcgggcaggctgctcagggcgttgcccgtgaggttgaggatttccagggtgtcggccagttcgaagatttcccgggggaattcggtcagcccgcaggccaggtccaggcgcgtgatgccggccaattggccggccttgagttgggcgagggtattcatgaacggcgcggctactcggctaaagggcgtaaatggcgctcatgataccgggtcggatgcgtgttgcgggctggccttttgtaattgatgcaggcggctggcggtgcgggcgaggtcgatggcctggccgctcagggcaatgtccagcgactgctcgccgatcagggtcagccgtttgtcgcggtcgtaaagcacgtccaccaggttgataaaccgctgctgcacggcgatcgggcagtccgccagcggtggcaggccgtcgatgatccagtggtcgtagtcctggcacagcagcaggtaatccatcacggcggtgagctgttcgcaaagatcattgaaggtaaaggcaatggtgcgcgcgccatggctacggcaagtcagttgccgggtgccgaccgtcaagggctgcggcgggcaatccgtgctcggcaggcccagcgcctggcgttgtgacgccgtgcccggccaaacgtactgcccgctggtaaagcgttgtgaactgcgggcctggggcaagctgcgaaagtcctgcggcgagctgacttccagcacgtccatgcgcgcggcgatcaggtcgatgaccggtttgaaacgctcgtggtacagcgggttgggcagcaagcctgcgggcgggtagttggacgttaccagcaccagcacgccccgcttgaacaaggccttgaacaggcggctgatcagcatggcatcgccgatatcgtggacatggaactcgtcgaaacacagcacccggcagcccgccagcagttcgtcgagggtcacggccagggcgtcgtcgtgttcgcggtgcttgaacatgccgcgatgcagccgcgcgaaaaactcgtgaaagtgcacgcgctgcttctcggcaaccggcaacgcctggaaaaacccatcgagcagccagcttttgccacgccctaccgggccgtgcaggtacaggctgcgcgtcggttggcccgcgagcaggtgcgcggtttcacgggccagcgctgcaatggcttgggactggccgctgctgagggtatagccctgttgcttcgccctgttctggaaaaacgccgggatgggggtgtcggcagggctctggttttttttaccgagcaggcgctggatcagggaaagcacggccaaggcgggtcactctgtgtttcggtggtcgctcactttagggcgagcggggcgatttgaccaatagagaaggggcctctccagctatgccgaaaaggcatggcgtgggcgcaatcccgcctggactggcagtttccctcttaatgactaacctcatacacagcagtcacccctgtataaggaattggggcagtgaagggacccgcggtattggcagtcatgggcgcgatgctttgcagctcggccggcgctgcgcagctccaggtggaggtgcgcatcgacgtgcagcgcggctgccaactggtgggcaccacccgcagcgctggcatcgagcaacttggcgtattggatttcggcagcggcccgcgtctggatgacccggccgggcccctgagtgcggccctgatcagccagcgccagccgcgcctggaatgcaaccccgacaccccttatcaaatgcgcgttgacggcggcctgcacggtggcgtcggtgaggtgcgctatctgagcgcggcgagcccgtcgagcaaacccattccctatcgcatctacgccgacgccgcgcggttgatcccgttgccggtggacgtgccggtcagtggccgcgtgccggattccggctcggtggatttgccgctgtatggccgcatcgagccgctcaaggctattcccgccgtcggccgctattccgacctgctcaaggtcaccgtcacatggtaagccgctacctggccgtgatggccatgggcggcttgctgctgctggccgatgacgcccaggcggcggccgtgagcgggcagatccatgcgcggctggtgatcaccgccagttgcgaggtgagtaaaggcagtgacagcgccccggtcagccccaacggcggtaccgcgctgctggatttcggcagccaggggccgacctggaacaacaccttgggcgccggtatttccgacggtgacaaggcgccgctggcggtgtcttgcaacccctcggtttcaagcttcaccgtgaccattgacggtggcaccaatggcgatggcaccacgcggcgcttgagcaacgggcgtcagaccattccttatcggctgtctgccgaccctcagggccgcagcagctatagcatcgggcaacaacgcaattttgtcgtggccagggggacacaaataccgatcccggtattcggctccgtggtggcaaataccagtgccttgccggcagggatctacaccgacacgttgacggtgacactggattggtaaatcaagaggatgaacatcatgcatgcacttgtatctcggataggcatttgcgcagtgggcctggcgatggcctccagcctcaatgcggcgacgaccgtgaccggtcagatcagctccacgctgacgctgattgccagttgccaggtcaacggctccggcgcggccaccggcctgaacttcggtagcctgaactttggcaccaccaacagcctgttcaccaacgccgatgcccaactgctcggcggcaccggcaccggcggcgcattgtcgatcctgtgttcggccggcaccacacccgcggtcaaggtgcgtgccggtgcacatgatggcgcctctccgggcggcacgcgtgcgctggccgatggggcaggcaatttcgtcccttacgacttttacaccgacagcgggcactccgcgctcctggcgattgatggcgtggtgacgctcgcgaccagtacgggggtcgcgcagaccgtggcgctttatggtcgtgcggtgggcaaggccggcttgccggcgggcacctacaccgacaccgtcgccgtggaattgacgttctagggccatgaaccgttcggtggcgagggtcgtgctggcgtgcgggctggccgtgccactgccgttgtcggcggtgaccagccagagcttccaggtgagcgcgaccatcacgccgggctgcctggtcgtgggcgggggctccaactacggcgcactgacctacggcagctattcggccctggcgacaagcaccgtcacggcggcgctgaccggcggggtgaccttgcaatgcacgccgggcgtgacgttgagcatgagcgtcaacggcggcctgcacagcagtaccgggcgtaacttgcagctcaacagtggcagtgcgcgagtggcttaccaattgtttcgggatgcggcgttcagtcaggccctgggaatcagtcagagcgtcaacgtgacgtacagcgatgccaacaacatcagcctgccgatttacggacgggtgcagttaccgggcaatcagcctggggggacgtacagcgacacgctgcaggtgcagctgacgtggtaggggctatcggtataaggagtgggtttatgcgttcaacttcccggcggtcgtgggccgcgggtgctgccttgagtgccttgtgcgccacagggtgggtgcaggccgccagttcggtgctgatctggccgatcgacccggtgctggaggccgaccaacaggccagtgcgctgtggctggaaaaccgtggcaccgagaccgccagcttgcagattcgtgtgtttgcctggagccagagcggttttgacgagcaataccagaaccagcgcgatgtgatcggcagcccgccggtggcgaaaatagagccgggccaaaagcaactggtacgcctgacgcgcacccgtgaagtgccgccggggcaggagttggcgtatcgcatcatcatcgacgaaattcccacggcgctgcaggttccgccgccaccggaaggcaagaacactgccgccgccattcgctttcagatgcgttattcggtgccgctgtttgcctacggcgcggggttgtggagcaaggacgacgccacacgtcagcgcgaccccaaaggtgccggtaaaccggacctgagctggcaaaaagtcacggtggccgggcgcacttacattgaggtgcgcaaccagggtgccgtgcatgcgcgtctgaccgatgcctcgttcaagcagggcgggcaggctcgcccgctggtcgacggcttgctcggttatgtgttgccgggcgcgaccatgcgctggccggtgccggatgcgatatccgccgaccagccgttgcaggtgcgcgtcaacggcgccccccaattggagagcctggcaccgaagcgataagcgtttttgcagcgggacgggatgatgcccgggtttaacaggatggagatgtccattgaaggacacaacgccatggagccgtggtcgggctcgttgtaggtggccgtcggtggcagtggtgagcgggctgtggggcgcaatgatcgcgcttccgggcgtggcgggcgacctgccgccgcccccgggcagtatggaggctgtcgccgatgcacagctgtttctggagctggtggtcaaccagatggacacgggccgggtcatcgcggtcgatcagcgtgccgggcaactttatgtgccggccagcgcgttgcaggacgtgggcatgaaactgcccggcgacttgagcggcagcgtcgacctcgacacagtgcccggcctgcacagcgactacgacagcaacggccaacgtttgctgctggatgtgccgccgtcgtggttgcaggaacagttcatcggcaatcgcaatacctacccgcgtacccaggcgatgagcagcttcggcgccttgctcaactatgacgtgtatttcaacgacaccgatgatggcggccgctacctggcagcctggaacgaagtgcggctgttcgacaattggggcaccttgtccaacaccgggcaataccgccagaccctcgccggtggcgtcagcgacagtacgctcaataatggctaccggcgttacgacacgacctggcgtttttccgatgatgagcggttgctgacctatgaggccggtgacgtgatcagcggctcgctgccctggagcagttcggtgcgcctgggcggggtgcagtggtcgcgggactttgccgtccgcccggacctggtcacttaccccttgccgcaatttgccggtgaagcggcggtgccgtcctcggtcgatctgtttatcaacggctacaaatccgaaagcgcgctgctgcagccggggccgtataccctgaccaacgtcccgtttatcaacggcgccggcgaagcggtggtggtcactaccgacgcgctggggcgccaggtgtcgacgacggtgccgttctatgtcaccagcacgctgctgcaaaaggggttgaccgatttctcggtggccgccgggaccttgcgccgagactacaccgtgcgcgatttcggctacggcccgggcgtggccagtggcaccttccgttatggttattccgataacctgaccctggaaagccacgccgaagcctccagcgacctgaccctgggcgggctgggtggcaacctgcgcctcggcaactttggtgtgctcaacactgccgtcagccagagccagttcgatggccgcaccggccagcaattgagcctgggttatcagtacagcagctcgcgctacagcctctcgtatcaacgggttcagcggcgcgacgagtatgccgacctgaccctggtcgatacgccttatgccagcctcagcaagcgtagcgagcaagtcacgctgagccttaaccttgagcgtttcggcagcctgggtgttggctacttcgatgtgcaggccgcggacgattcacgcacgcgcctgctcaacctcagctggagcaaaccgctgtggcataacaccagtttttacctgtcggccaaccgtgagatcggcgacagcaactgggccatgcaggcgcaattggtcatcccgttcgatatcaacggcagcctggccttgagcaccgagcgcagcaaggacggcgccagccgtcagcgcatcaactacagcagcgcggtgccgagtgacggcggggtgggctacaacctcggttatgcccagggtgatggcccgacctaccgccaggccgacctgacctggcgcctgcaatcggtgcagttgcaggccggtgtgtacggcagcagcggcgctgaaacccgttgggcggatgccagtggctcgctggtgtggatgggcggcgacacttttgccgccaaccgcatcaatgacgcgtttgtggtggtgagtacccagggctttggcggcattccggtgcgctatgaaaaccagctggtaggccagaccgaccgtaacggcaaattgctggtgccgtggagcagtgcgtattaccgcgccaagtatgaaatcgacccgctgaacctgccgccgaacgtgcagagcccgaacgtggaacagcgggtttcagtgcgccgtggcagtggttatctgctggagtttccgctgcgccgggtgctcgccgcgagcatcaccctggtggacagccagcaccaggacctgccattgggcagcctggtcatccatgagcagagcaacagccaggccgtggtcggatgggatggcctggtgtacctggaaaacctcagtgcgcacaacacgctgcaggtcacgctcggcgaaggccgtagctgccaggcgtcattcgatatcaatgagcagcaacaggatgtgcccttgatcgggccattggtgtgccagtgagcggttaaaagaggagtgtgcgggtgaggggcaagggatggctttacagtgtgttggccggcgcgggcctggcaatgtccagccaggcaatggctgtgtgttccacggttgccacgtcacctgcgagtttcggctcggtcagttcgatcaatgtgaacaccaccgtgcaaaacagttcgaccttgaacgggggcttgagctgcggctcttcgctgattgcactgggcaccagcgatcacttttatctgactatctcttcgctgacttcggggctggtcggccccacgggcgatgtgatcggttacacggtctacggcaataactccaccagctttccgatcaaccgtaatacccagttcgatttcgggcccaatggcattgccaccgcggcggggttgttgacggggccgggtaacaagtctttgccgctctacctgggcagcatcaccggcagcaacgtggcggcgggggtttacaccgaggtcttgaccctggcctggggctgggattattgcattggcctgggggtcggcagcttgtgtgtgctgcgcgataaaaacctcgcccccgccacccgtaccctcaccgtcaccctgacggtcaccaatgattgtcagatcaccgccccggcgatcagttttggcagcgctccagtgatcagtggttttgccaccgtcaatggccaggccagcgtctcctgcaccaagggcagttcctacagcgtgggcctgagcgatgggcagaacccgatcagcgtgggagggcgccgccgaatggtctccgctggcaactacctggcgtacgacattttcaaaagcgccggcacgactcgctggggcagcgtgggcgcggcgcggcgcgacagttcgactgccgagatcaacccgggcaacggtctgggcagcggcgccagtggcggcagccaggtgttcaactacaacgccaaaatctacgccgaccagaccacgccaccgggcggcacctacctggacaacgtggtgctggacgtcgggttctagaacttcagcatctgcgtggtcggctgatcgaccgggctgaccactgcatagttgtagcccgcacccgaccagtactcggcttgcagcccgtcggcgctgcgacggccacggggcaggaagccgttttccggccctggcgggcggatatagaagctgatgcgccggccttgagggtcctcgtacaagaccatggcggccgcgccttgctctgtggtgagcaagcgcccgctgaccggcttgaagcctgactggctcaggtcgggcaggcggtgggcctggttgaagtaacggtcgagccaagcctgcatggtgccgccgtcccgagcgttgtaatcggcgggcatgatgccgtcctggccaaacaggcggaacgcttgcatcgcatcggccatgggcagcatggcgggctgggccgcttcgcgggccttccagccgccgaggccgccaaggctgaccgcgataagcagcacggccgcggtagcaaaatggcgacgtgtttgatgcttgatgcgctggcgaatcagcgccgggtcgaggtcggggttgggcggttgttgcagggccccgctcaacgacgcacgcagcagctgggcatcctgttgccaggcctgcacttgggcggcggtgtcggggtgggtggccagccaggtttcaagcacgcgtcggtcggcctccagcaattggtggtcgacgtaggcatgcaaatcgcgttcgctggggggcaggctgatcatttgagtatccgcagggaagggctggcaatttcgccgtcactgagttgacgcaaggcttggcgcgcgcgggacaggcgtgacatcacggtgccaatgggtacatcaagaatctgggcgacctctttgtaactaaggccctcgaccgagacccagagcagcagggcgcgctgttcggtgttgagctggtcgaaagcctgaagggctgattgagccatgaccgtacgctccaccgagggctgtgcgtcgtcacggccggtgaaaaattcgagcatgcgcgcgtagcgcctgctgcgccggtgagcgtcgaggaactggcgataaagaatcgagaacagccaggcgcgcaaatcgccttcgatgcgtttgtcggtccaactgatgatcgcccgctccagggtcgactgcaccaggtcgtcggcgctactggcgttacgggtcagggacacggcaaagcgccgcaacctggggatgatttcacgtaactgttcgtcgagttcatgcatggtcggctggctggtcactacgctgggactagagagacgtccggcgctgaaggttattccttttcctgaaaaataaactcaagggcctggaatagagcggatcggcgttcgtcttaatgctccgaccttatgtttcaccccctaaggcctttggccctggagtcacttcatggtagatcactcatcaccgccccgtcctcccttgagcactgcgagcctgatcgcgcgactcgccgggatcggtgccgtggttgcggttgttgccggggcgtttgcctacgtcaatggcacgctcgacccacagcgcctgcgtcctaaaaccctggtcaatgccctggaaaccaataatggcatacacccgggctttcgccgcaaccacgccaagggcgtgtgcgtggcgggttatttcgagagcagccctgaggcgcgcgcgtactccagcgcgcaggtattcagcgaggcgaaaaccccggtgattggtcgttttgccctgcccagcggcaacccttatgcgccggacagcagtgtgccgatccgcagtttcgccctgcaattcagccaggccaacggccagcagtggcgcacggggatgaacagcatgccggtgttcccggtaggcacacccgaggcgttctaccagatgctcaaggccggcgcacccgacccggccacaggcaaaccgaacccggcgaatatgccggcgttttttgcctcacacccggagactgcgccgtttctggcttgggtcaagacggccaagccgtccgccagctatgtgactgaaacctataacggcatcaatgcgtttttcctggtgggggccgacggcaagcgccaagccgtgcgttggggcgtggtgccgcaaagccaggacgcgccgggtgaaaccgcgccgtcgggcagtgatttcctcgaaaaagatttggcacagcgcctggcttcagggccactgcgttggcagttgagcctgaccctggccaaccccggcgacccgttggacgatgcgagcaaggcctggacggggcagcacaaggtgctgaacgccggcaccctggtgttgcaaggcagccagccacaagcggatggcgattgccgcgacatcaactttgatccgctgattttgcccagcggcatcgaagcctccaatgacccgttgctggctgcgcggtcggccgcctatgccagttcttacgtgcggcgtgcgggtgaagtcagcccgctgcacagcgcccctcaggagtcgaagccatgaatgctcaaccacggtttttcgcgcctgtggcgcgcctgctgcattggctgatggcgctgatgatcctcgccatgctgtttatcggtgcgggcatggcggcgtcggtttccgaacggcacgaatggttgattcacctgcataagcctctgggcatcgccattctggcgttggtgatcgtgcggctgatcgtgcgcttctccacgcggcaaccgcctttgcctgccgatttgccgctctggcagaggttggcggccaaagcgtcccatgtgttgctgtatgggttgatgctggtgttgccagtgctgggctgggcgatgatttcggcggcgggtgacccggtaatgctcagcagctccgtgcaattgccggcgctggtaggggcgaacgcgccgttgtttgcactactgcgcaaagctcatggctatctcgcctacctgttgttcctgacggtgctgttgcacctggcggcggcgttgttccatgggctgattcggcgcgacggcgtgctgcaaagcatgaccggcaccaaggactgacgcggttcgcgtgtgtggtgagcgagcttttgtggtgagcaagctcgctcgccacagatcagcgcaaggctgtgacaatatccgccacgctgctcaatacgtctttgcctagctgcttggagcgctcaccggaccaaccggttttcgggttgggcaggtcgtcgttatccttgaagggcatctccagggtcaacgacaggcagtcgtatttctcgccaaccgcgttgcaggccagggtcatattggcttcgcccggcaggtcgcgggtgtagccgtgggtggtctggaagtcacgggtgagggcgctcaagtggctgcggaagtgtttctccagcgcctcgatacgcggcgtgtagcccgggttgccttcgcagccggcggtgaacacataggggatttcttcgtcaccgtggatgtcgaggaacaggtcgacgccgtacttttccatttgtttctgggcgaacaacacttcggggctgatttcctggctggcgttttgccaggcgcggttgaggtcctggcccatggcgttggtgcgcaagtggccatgaaaggcgccatcggggttcatgttgggtatcaggtacaggtcggcgacggacaggagttttttcagctcatcgtcaccgtcctgttgcaggcgttcgatgatgccttccataaaccattcggccatgtgttcgccagggtgctgctgggcaatgatccagaccttgcgttggccctcgccacctttgccgcggcgcagcagctggatatcacggccctcggcacttttgccggtggcaagcaactgggtgccggcgcggttcaaggcttgctcgatcagccagtcgtggcgttcacggctgtagggctcgaagtaggcaaaccaggcgtgtttctcgcgggtctgcagtgtgatgtgcagcgtttcgccatcaaagcgcgtggggacgcggaaccagttgatatggtcgtaggacgccacggcgttgtagccgctccaggcgtttttataggaggactggctcgcgttgctcaggcgaaagttgtgggtgtggcccacatgcatgccttcggccttgaaatggaaccattggaaatgttggctgcgggtgtcaggtttgattgccagcagcaattggtaggcgtcgctggcatccaggacctggatgttgccgctgtcaaagtcggtgctgatcttgatggaggtcaaagccacggtcatagtctgattgcctgaatatgagtgttgtggcggatatcttacacaggagccaggcaaaatcttgcggcaaaattgttgcgtgggaagggggcgtcatccttgacgcgtcagcagcttagaatctatgagattgattctcaagcgctatttcgcaaagatccgggctagagcgttcgttcggctttcttttggcaatagtcttttgctaccatgcgcgccatcaagcaacacacagtcttcattagcctgaagccacgccagggaaactggcaaaaaaaagacccggccaaagagccgggtcaaaaaccgtgattagcctgatgaggagatattccaagagtccgacctaaggtcccttggtctatcgactgatctcgcgatcagctgagtccaataataatcattatcatttgcaagtcaaatgtttttatccgtgagatagaaatatttttcttcgtgtctgtcatgtgcttgcctgagtagcgccgggcgcctgcaacgaccgctccaccatcgccttcgccatatcaatcaaatacaccactgaaaatgccaggtcgcgttggttgccctgatggctgcttgccgattcgtaggccgtggccgctgcgctgcgcaacaggtccgaggcgtgcaccagggcttcctcctggctgaggccgggcttgatggtaaagaagggctcgtctgtggttgatgccgacatatcttctttcaagtaatagtccagcgcacgcttggcagcgccgctgctgcgcatatcgttcagttcgtcgttttcgggtgtgtcgagcaggtgttgcggggctgtcgtcatgagggtcggtactctggcaggggggcgaaaaaccatggaaccgataatagtacgtatcgtatttatgtccttttatggattactacaaactgtttattgccctgaaaaatacgcaacgtattgtcaggccccatggataagtggatagcgttggtcaaggccaacatgaaagaccgcaaggtcactcaagacaaactggccgaacgcctgggcatgtcccagggcggcgtgggccattggctgaacaagcgccgtgtgcccacgctcgccgatatgaaccgggtgctcgcggagctggggttgggatacctggaagcggtgttggaaattcgcgagaaggccgacgaagagccggccccggaaaaacactacaacccgtattttcgctacccggtcagcgactggaaaggcgtctgcgagatccgcgaagaacgcccggcctacggcgccgcacggttcgaattgactgactatcacgcccgtggcgaagccttctggctacctgtgacgggagatgccatgaccgcccccagcggcttgagcatcggcgcaggcatgatgattctggtggacccggccatcgacgtcgagcccggcaggcttgtcgtcgccaagtgggctggcagcacccaggccaccttccgccagttgagggaagagagcggccagctttatctggtccccctcaaccccacttatcccaagcaactgtgcacagacgagtgccgcatgctcggcgtcgtggtgcaagccacggcgaagttctagctcgccgtttcaagctccaccaacgcactgccttcggcgaccatctcgccttcctggcaaaacagtgccttgatcaccccggcccggggcgcgcggatgctgtgctccatcttcatcgcctccagcaccaccagttgcgtgccggcctccacggtttggccgacctccaccagcacccgaacgatgctaccgttcattggcgccgtgaggccgccttgttgggcaccattggcttcgaccgctgcaatcgggtcaaacaggctgaccgcatgcgtctcgccgtcccagcgcaggtacacggtgccctcgctacggactgcaagatggctgcgccgcacaccctggtgctcgatgaccaattgttcaccctgccagtgcgcagcgctgctggccaacgtcaccagccggtcctgcccggcgcagctcaagtgcaacgagacctcggcaggcagcccagcgcgaaacccccgcgtgtcggcccaaggcccgttacccaccggcaaactctgcataaaggccgagcccgccgcctgccagaactcatcgctcatttcgccggccaccggcaacagctcatcctgataacgcggaataaacccggtatccaattgcgccgccgaaaatgccgggtgcccgataatccgccgcaaaaagcccaggttggtcttcagcccgccgacggcgaactcgtccagcatggccaacaaccgcaggcgcgcctgttcacggtcttcaccccaggcaatcagtttgcccagcatcgggtcgtaaaacggcgaaacactgtcaccttgcgacacgccgctgtccacgcgccggcccgggccgggcgccgattcacggtacagcgcgaggcgcccggtcgccggaagaaaatcactggccgggtcctcggcatacagccgaacttcaatcgcatgcccgatcagtggcacttgttcctgggtgatcggcagcggctcacctctcgcgacgcgaatctgccacgccaccaggtcgaggccggtaatcgcctccgtcaccgggtgttccacctgcagccgcgtgttcatttccataaagaaaaattcgccacgggcgtccagcaaaaactccaccgtccctgcgcccacatagccgatggcctgggcggcgcgcacggcggcttcgcccatggctttgcgctgttcaacgctcaagccgggtgccggcgcttcttccacgaccttttgatggcgacgctggatcgagcaatcacgctcattcaaatacaaacagtggccatgctgatcggcaaacacctggatttccacatggcgcggcttgagcaggtatttctccaccagcatctgcccgttgccgaatgacgacagcgcctcacgctgcgcagaggccagcgctggagccagttggctgacgtcctcaaccactttcatgcccttgccgccgcctccggctgcggccttgagcaacaccgggtagccgatgcgctcgcaggcggcgcggaaagtctccaggtcctgggcctcgccgtgataacccggcaccagcggcaccccggcggtttccatcagggccttggcggcggatttgctgcccatcgcgtcaattgccgaggcgggcgggccgaggaagatcaagccagcggtttcaatcgcacgtgcaaactcggcgttttctgacaggaaaccgtagcccggatgaattgcctgggcaccgctggctttggcggccgcaatgattttgtcgatttgcaggtagctttcggtggccttgctgccacccaggtccacccgaatatcagcctcacggctatggcgtgcatcgcggtcgatggcactgtgcacggccacggtggtcaagcccatggctttggcggtgcgcatcacacggcaggcaatctcgccgcggttggccaccagcacggtggtcaaggttttgctcatgaacgtggctcctgggcttgccagctgggcgtgcgtttttgcaggaaggcgcgcaagccttcctggccttcggggctgacacgaatccgcgcgatggcattttcgcaatagcggcgcagggccggggtgagggcgccgttaccgacttcgcgcagcaaatccttgctggagcgcatcgcggccgggctgttttgcagcaggttggcgatccatttttcaacctgcaggtccagctccacggcgggataactttccgccagcaaaccgatttcccgcgcgcgctggccgccaaaacgctcggcggtcagggcatagcgccgtgctgcgcgttcgccgatcgccttgaccacgaacgggctgatcaccgccggggccaggccaatgcgcacttccgacaaacagaactgcgcgtcatctgcgccaatcgccatatcacagcaactgatcaaacccaatgcaccgccgtaagccgcgccttgcaccaccgccagcgttggaatcttcagcttggccaggttgtacatcagctcggccagttcgcgggcgtcatccaggttggtgtggtaatcgagttcggccgactgctgcatccaggcaagatcggccccggcgctgaagtgcttgccgcgcccgcgcagtaccagaaaacgcagcgaggcgtcgccctgcacttggtcgagggcaatgatcagttcgcggatcatctcggcattgaacgcattgttcttttcttcacggctgagccacagcgtggcaaaaccacggctgtcggtgatcatttcgagggtgttgaaatcgctcatggggtacggctccatttacatgcggaacacgccgaagcggctcggctcgatgggggcattcagcgcggcggacagggccagggccagcacatcacgggtctgcagcgggtcgatgacgccgtcatcccacaggcgggcactggagtagtaggggtggccctgggtttcgtactggtcgaggatcggctgcttgatcgcgctttcttcttcggcgctgaacccgctgcccgcgcgttcagcctgttcgcgcttgacctgcaccagcacgcccgcagcctgttcggcccccatcacgccaatgcgcgcattcggccacatccacaagaagcgcgggtcgtaggcccgcccgcacatcccgtagttgcccgcgccaaagctgccgccgatgatcacggtgaacttcggcaccttggcacaggccaccgccgtgaccagcttggcgccatgtttggcaataccgccggcttcgtatttctggccgaccatgaaccccgtgatgttttgcaggaacagcagaggaatgccgcgctggcaggccaactcgataaagtgcgcgcctttttgcgcggcttctgcgaacaggatgccgttgttgcccaggatcgcaatcgggtagccgtgcaggtgcgcaaaaccgcataccagcgtggtgccgaacagcgccttgaactcatcgaacaccgaaccgtccaccagccgtgcgatcacttcgcgtacgtcaaacggctgcttggcgtctgccgggatcaccccgtaaagctcctcgctgctgtacagcggcgtgacgggcgtgcgttgcagcaactcgccttgtttgcgccaattgaggttggccacgcttcgccgcgcaagtgccagcgcatgttcatcgctgtcggcatagtggtcggcgacgccggagatcttgcagtgcacatcggcgccgcccaggtcttcagcgctgaccacttcaccggtcgcagcttttaccagcggcggcccggcgaggaagatggtcgcttgccggcgtaccatgatcgcttcgtccgccatggctggcacataggcgccaccggctgtgcaggaacccatcaccacggcaatctgtggaatgccctgggcgctcatgttggcctggttgaagaagatccgcccgaagtgctctcggtccgggaacacttcgtcctgacgcggcaagttggcgccgccggaatccaccaggtagatgcacggaaggcggttctgctcggcgatggcctgggcgcgcaggtgttttttcacggtgagcggatagtaggagccgcccttcaccgtggcgtcgttggcgacaatcatgcattcgacgccttccacgcggccgatgccggcaattacacccgccgccggcacgtcttcgccgtacacctgatgggccgccaactggctcagttcgagaaacggcgagcccggatcgagcagacggttgatacgctcgcggggcagcagcttgccgcgcgaggtgtggcgttcctgggctttggcgccgccaccttgctgcacctgggcgagcagggtgtgcagggcgtcgacctgttggcgcatggccgcgctgttggcggaaaactctggcgagcgcgggttgagctgggtatgcaagatggccatggtgcgctccttcagcgggtttcgttgaagagttcgcgaccgatcagcatccggcggatctcactggtcccggcaccgatttcgtacagcttggcgtcacgcagaaggcgcccggcggggaattcattgatgtagccgttgccgccgagaatctggatggcatccagggccatctgtgtggcgcgctcggcgctgtagaggatcaccccggcggcgtccttgcgcgtggtttcgccgcgttcgcaggcctgggccaccgcgtagaggtaggcgcggctggcgttgagttgggtgtacatgtcggcgaccttgccctggatcagctggaattcgccgatgctctggccgaactgcttgcggtcgtggatgtagggcacgatcaggtccatgcaggcctgcatgattccggtcgggccgccggaaagcacgacgcgctcgtagtcgaggccgctcatcaatactttcacgccgccattgagtacgccgaggatgttttcctcgggcacttcgacgtcatcgaaaaacagctcgcaggtgttggagccgcgcatgcccagcttgtcgaacttgttgctgcggctgaagcctttccagtcgcgctccacgataaacgcggtgatgccgtgggcgcctttttccaggtcggtcttggcgtagatcacgtaggtgctggcgtcggggccgttggtgatccaggttttgctgccgttgagtacgtaatggccaccgcgcttgtcggcgcgcagtttcatcgagaccacatcggaaccggcattcggttcgctcatggccagggcgcccacgtgctcgccgctgatcagtttgggcaggtatttgagtttctgctcatggttgccgttgcggttgatctggttcacacacaggttggaatgcgcgccgtaggacaacgccaccgaggccgagccgcggctgatttcttccatcgccaccacatgggccagataacccaggccggcaccgccgtattcttccggcaccgtgatgccgagcaggcccatgtcaccgaacttgcgccacaggtcggcgggaaacaggttgtcgctgtcgatctgggccgcgcgcggcgcgacttccttggccacgaagtgctgcacctggtcgcgcagcatgtcgatggtttcaccgagggcgaagttcagggacgggtaactcatggacaggcaccttactgtgagctttgttgttgtgtggacggcgccgggggagggcgctcacctttacgttaacgtaagcttgcgttgcgaggctgtcaatcgtagtttacgtttacgtcaagcaaccgccgtccaccttacaaaaaagacaaaaggggccgttatggatcaaccgaacccgagctacagccgtggctctcaggacaagactttgctggctgaaacgatcggccaggcctttgataaaaccgcagcgcgctacccggacggcgaggcgttggtggtacgccatcagcaacgtcgatattcctggcggcaactggccgagaccgttgatttgcatgcccgcgcatttatggccctgggcatgcaaaccggtgatcgcctgggcatctgggcgcccaattgcgccgagtggtgcatcagccagatcgccagtgccaagctcggggtgattctggtcaacatcaacccggcgtatcgcagcagtgaactggagtacgtgctcaagcagtccggctgccaatggctggtgtgtgcaggttcattcaagaactcggattaccgcgcgatgttgcaggaactgaaacccgacctgcgcgccatcatcagcctcgaccccagcccgccctcgggctttgtgccttggtcgcaactgtcggccctcggtgaaggtgttacgcccgagcagttgcacagccgccaagccagcctgcatttcgatcaggccgtaaacatccagtacacctccggcaccaccggtttccccaagggcgcgaccctcagccaccacaacatcctcaataacggctacatggtcggcgaaagcctgggcctcaccgcgcaggatcgcctggtgataccggtgccgctgtatcactgctttggcatggtgatgggcaacctggggtgcatcacccacggcaccaccatgatttacccgaatgatggcttcgacccgctgctcacgttgagcgccgtcgccgaagagcgggccaccggcttgtacggcgtgcccacgatgtttatcgcgatgctcgatcacccgcgccggggcgagttcgaactgtcaaccttgcgcaccgggatcatggcgggcgccacctgccccatcgaagtgatgcgccgtgtcatcagcgagttgcacatgggcgaagtgcagattgcctatggcatgaccgaaaccagcccggtgtcattgcagaccggcgcgaatgacgacctggagcggcgcgtgaccaccgtcgggcgcacccagccgcaactggaaaacaaaatcatcgacgctgccggcaacaccgttgcgcgcggcgaagtcggtgagctgtgcacccgtggttacagtgtgatgctcgggtactggaacaaccccgaaggcacccgcgacgccatcgacgacgccggctggatgcacaccggtgacctggcgaccatggatgaacagggttacgtgtgcattgccgggcgtaacaaggacatgatcattcgcggtggcgagaacgtgtacccgcgtgagctggaggagtttttcttcacccacccggcggtggcggatgtgcagatcatcggcattccggacgagcgttatggcgaagagatcgtcgcctgggtcaagttccactccggccatgtggccaacgagctggaattgcagacctggtgcaagggccgcatcgcgcacttcaagacgcccaagcatttcaagttcgtggatgagtttccgatgacggtgacgggcaagatccagaaattccgcatgcgcgagatttccatcgaagaattgcgaacccgatccggctaacgccacaaggctcatgtgggagctggcttgcctgcgatagcggtgcatctgacaggccgcaagcgcaggcaagccagctcccacagattggacagttgagtgtcaggtgcagaacgcacaaaggggacccgaaggtcccctttaatttgtcgttgcgtgctctttttttattattgaggggcggtctattgttgtttttggcaaccgttaccctttaccgctgtttttggcgacccccatccggggtcaagagcaaacgtatttttttgaacgctgacctgcttcttcgtgatcgacccaaccagtggcagctacctgaggtagttttatttttctctaaccggttgcgggtttcggcatgccgtaccctgcgaagcacatcttcttcaaaaaaatctgttagctgcgtctctgccgtgttgtttttgttatgtcagagtcgtttcgtcttatttttattaggtttggcgctttttattcttgttatgccatagagatagcagaagccgtgccaacttttaaaagtcctttaaaatcaatggtttgatttttatgtaggacatggccttcagcaaatgcgacaaaatatgttcccgtgttactcgaaacgtaagcgtgcggtaacacattgtcacagcctccctactcaaacggcattacgtgccttggcgacgcgcgacccggtaggccggcccagcacctggctgatttgccggcccgcacgcatcaaggcgtccaagtcgatacccgtttcgatccccaggccgttgagcaggtacagcacatcctcggtggcgacgttaccgctggcgcccttggcgtacgggcagccgcccaggcccgcgatagaactgtcgaacacattgataccttcgagcaggctggcgtagatattggcgatggcctggccataggtgtcatggaagtgcccggccagcttgtcccggggtacctgcgccccgaccacctcgaacaaccgccgtgtggcgcctggcgtgccggtgccgatggtgtcacccaaagacacttcgtagcagcccatggcatacagctcccgtgcgacggcggccacttgctccggcgcgatgtcgccttcgtaagggcagcccaacacacacgacacataaccgcgcacgcggatgccgttgttcctggccgcggccatgatcggcgcaaagcgctccaggctttcgctgatggaacagttgatattgcgctgggaaaacgcctcggacgccgctgcaaacaccgccacttccttcacgcccgcagccagcgcgtcttcaaaaccgcgcaggttcggggccagcgcgccataggtcacaccgggcttgcgctgaatctgtgcaaatacttcggcggagccggccatctgcggcacccatttgggcgaaacgaaactgccgacttcgatatagctcaagccggccgcactcagcgcgtcgaccagttgcaccttgtcggccacgctgatgggttgggcttcgttctgcaaaccgtcgcgcgggccgacttccaccaggcgcacgtgtgaggggaggggcatggcagctaccttctgatcaatggccaacctggcccatggtgtgcgcgagggcctgggtgcagcgctcttcggcggtgtccagttccagtttcatctgttcgatatccagcaactgttgctcaagctgctcacggcgctcagcgattttttccagcatgctgttgagctggatgtggttgccgctgctggggtcgtagagttcgatcaattcgcggcactcggccagcgaaaacccgatgcgcttgccgcgcaggatcagcttgaggctgaccttgtctcgcgccgaataaatacgctcctggccccggcgctccggggccagcaggccttgttcttcataaaagcgaatcgcgcgggtggtgatgtcgagctcgcgggcgaggtcggagatgctgtaagtggtgctcatggcggcgctcaagaggggcttggcgctaagctaatggcaggttgacgtaaacgtcaagcaaatagcccgcaagctccctcgccacagaagcggtcaggcttgcttgccatccagcttcttctcgtgcgccgtgacttgttggcacaactcgatcatctgctcgcgcatccagcggttggccgggtcctggtcggtgctttcgtgccaatacaggtgggtttccaccggcggtacgtcattgaccggcaggttgaaccagtgcagttcatggcggcgggcaaagcgttcaggcacggtcatcaccatgtcggtctgctgcaacacttgcgaagccatcaagtaatgctgtgagcgcaaggcgatcttgcgctgcaggcccatcttgccgagggccaggtccacgtggcccaaaccgttgcggcggctggaaatatggatgtgggtcagcccaaggtagtcatccagggtcagcttgtccttgcccgccagcgggtggcccttgcgcatggcgcacacgtaacggtcttccatcagcttgacgtggcgcacttgcgggtcggtgttgagcggcgcatccacggcaaagtccaggcgcccggcggcgagttccttggtggtttcacggcgtttggacaggaagctctcgatcaccaccgtcggcgccaggcggcgcaggcgctggaacagcagcggcaaaatcaccgcttcggtgaggtcggtcatgctgatgcggtaggtcttggccgcttgttgcgggttgaaaatccggctttcctgcaccgacacccgcagcaacgacaacgcattgcgcaccgggccgatgatgttctgtgccatgggggtaggcaccatgccctgtgcggtacgcacgaacagcgggtcgttgaaggtctcgcgcaagcgtgccagggcgttggagaccgccggctgggtgatgccgacaatctgcccggcgcgggtcaggttggcttcggtgtagatcgcgtcgaagacgatgaagaggttgaggtcgaccttgctcagattcatttcgttgcgctcttattgttagatgccgataggccgatcatatatcggtgatgaatgttaatacacgccgagaataggctaggtaaattatcaacgctgttctagcatcgattgcatgacctaaacaacctctcagagaagggagctgctcatggatttcgcctattcgcccaaggttcaggaactgcgtgaacgtgtcaccgcgttcatggacgcttacgtttacccggccgagccggtgtttgaacgccaggtcagcgaaggtgatcgctggcagcccaccgccatcatggaagagttgaaggccaaggctaaggccgaggggttgtggaacctgttcctgccggagtccgaattgggcgcgggcctgaccaaccttgaatacgcaccgctggccgagatcatggggcgctcgttgctgggcccggagccgttcaactgctcggcccccgacaccggcaacatggaagtgctggtgcgctacgccaatgaagaacagaaacaacgctggctggaaccgctgctgcgcggcgagatccgctcggcgttcgccatgaccgaaccggatgtagcgtcttcggacgccaccaacatggccgcccgcgccgagcgccagggcgacgagtgggtcatcaacggcaaaaaatggtggacctccggcgcctgcgacccgcgctgcaagatcctcattttcatgggcctgagcaacccggatgcaccgcgccaccagcagcactcgatgatcctggtaccggtggatacccccggcgtgaaaatcgtgcgcccgttgccggtgttcggctacgacgatgcgccccacggccacgccgaagtgctgttcgacaacgtgcgcgtgccttatgaaaacgtactgttgggtgaaggccgtggttttgaaatcgcccagggccgcctcggccctggccgtatccaccactgcatgcgctccgtcggcatggccgagcgggcactggaattgatgtgcaaacgctccgtcagccgtaccgcgtttggcaagccgttggcccgtctgggcggcaatatcgacaagatcgccgactcacgcatggaaatcgacatggcgcgcctgctgaccctgaaagcggcgtacatgatggacaccgtgggcaacaaagtcgcgaaaagtgaaattgcccagatcaaggtggtggcaccgaatgtggcactgaaggtcatcgaccgcgcgatccagatgcatggcggtgcgggtgtttccaacgacttcccgctggcctacatgtacgccatgcaacgcaccctgcgcctggccgacggcccggacgaagtgcaccgcgcggcgattggcaagttcgagatcggcaagtatgtgcctaaagagttgatgcgcagcgggcagtagcaccgcgccgccagcatcgcgggcaagcccgctcccacatttgaccgagttccaacttgagaatgcggtcaagtgtgggagcgggcttgcccgcgatgaggccagtgtttacaccacaaggcccaaggttcagtacacccaaacctccacccgccgattcttgatccgcccctcatccgccgtattcgtcgccaccggcatctgcgcgccgaacccgcgaatatcacgcagtacaacaccgcttttgaccagttcccggcgcaccgccatcgcccgcaatttggagagcaacgccgctcgctgcgggtcattcttggcatcaccaaaccccaccagcgtgacctgcttgtcgagtttgttgtggcttcttaaataagccaccacccgctgcaaatcctggcgtgccttgttgtccaggctggcgctgccttcctcgaaacgaaaattcacggtcaagcgctgggcgtcacgggcgatggcctggtagtcctcgggcatggaggcacgcggttctacggcgatggcctgcacgtgctgcgcgataaacccgttggccgccacaatcgcctggcccttgctgctctgggcaaaactcaccagtgcattggcccacaggttgtgccccgccggcggcaggtaaaaatatagccggcgcgacagcgggtagtcctcggtggcaatcaggctggtcagtggcagcatgggctgcgaatcgccgtcgacaatcgccaccgccttggcctgacgcacatagggcaggccgataaatccgatgccttgagggtcatggctgaccgcatcggacagttcttcgctggattcaaaccgcttggcgccaggggccaagggtttgccgcgcaggcgcagcaccagttccttgaaagtgtcgtaggtgccggattgatcatcgcgggcgtacagatgaatcgcaccgccgacgccccccaattcttcccaggcggtgacttcgccgttgaagatctgcgccagttgttcggtggtcagtgtattcaatgggttgcgcgggttaaggatgatcgccaggccatcaatggcaatcacctgctcggcgcccgggcttttcaggtcaccgagcggttcaagatccaccagctcactgtccttgatcgggcgcgaagaggccgcaaggtcggcgctgttttttttcagcgcggcaaacccggtgctggaaccgtgggccgcgacatcgatggtcacggtcttgcccaggcgggtcttgccgatcagccgctgttcgttggcgccttcggccgcttcactgtgcacgccctgtaaaccctgatgttccatcaaacccatcaccaatgccggccccagcgccgcgccaatggtgttggagccctggatgcgcaatgcggggccttgatcgggaacgggaaggggggcggcaacagcgtagaagggaaaagcggccaacaggaacagaacgcgcagcttcatgccggcaccttctcaagccaaagggggtgccgggagattaagtcaggcaggttgcataaatatgactggcacgccacaggttcaactgtgggagctggcttgcctgcgatagcggtgtgtcaggtaacagataattggctgatagacagccatcgcaggcaagccagctcccacactgaaaggtgttgtcagttcagttcaagccagatcggcgcatggtccgacggtttgtccagcccacgcaattcgtaatccacacccgcatccttgacccttgacaccaagccattggacgccagtatcacgtcgatgcgcaggccacgcttgggttcatcctcaaacccgcggctacggtagtcgaaccagctgaaacggtcggccacgtccgggttcaggtgacggaagctgtccaccaaaccccagtttttcaagcgggccatccattcgcgttcttccggcaggaaactgcacttgccggttttcagccagcgcttggcgttgtcggcgccaataccgatgtcgatgtcttcgggagaaatgttgatatcgcccatcaccaccagtggctggtcgttgctgaactggctttccagcagttgctgcaagtcttcatagaagcgctgcttggccgggaatttagtcgggtggtcacggctttcgccctgagggaagtaaccattcattacggtgatcgactggccatgctcgtcggcgaaggtgccccagataaagcggcgctgggcgtcttcttcgtcgctggcaaagcctttgtgcaggctcaacgccggcttgcgcgaaagaagcgcgacgccgtagtggcctttctgcccgtggtagtacacgtgatagcccagggcctctacttcggccagcgggaactggtcatcgtgaaccttggtttcctgcaggccaatcacatccggttggtgcttctcgatcagtgccgccagctgatgagggcgggcgcgcagcccgttgatgttgaaggagacgattttcatggtcggcagtccagtctggcaaaagggcgatgctagccgacaagtcggacgggggccagcgtggcagtagggcagatgcgctgctaatgtctgggaacgactcgtgctgtgcaggttcgtacccataagaacgctgccttttgagtagcgcccagggagattgacgctatgccggacacttcaactgcaactgctgaaattcgcctgctcaacagtggctactctcgcgaagcccgctccctgttgtaccaggcctatcggcatgagccgacgttcgcctatatctttgaagccgagcggccgggttacgaacagcgcgtgcgcgccaccgtgcgcgaactggtcaagcagcatttcttccaaaagcttcccgccatcggcctgttcgtcaatgaccggctgatcggcatcgcgttgatcgcgccaccgcaacggcgcctggggattaccgagagctgggcctggcagatccgcatgtggctgagcaccggcgtgcggggtacgcggcgttatcttgaatatcatcatgccgtgctcgcgtgcctgccgggggaatcggtgcatgtgctgccattgctgggcattcacccgcaattccagggcaagcattacggcgagcaactgttggaggcggtgcacaactggtgcgccgaagacccgcattcatccggcgtggtgctcgataccggcaactcgcgctatctggagttctacaaacgtcagggctatgaggaaatcggtgaagttgctgtaggaccggtcctggaacacgtgttttttcatgccaacccccaggcgttacaggctgcaacggtttgagacagaattattcagacaattccgggttcaaagagtctcccaagctcgtgtagcatccgcgcctatgaagtttccaggaagatttaccagcggcttgattctgctgttcacaagctgcggcgccttggcgcaaagcgaactggacgtgcgcatcaagccctcaaacgacgcgttgaaagccaatatcgaaggctatatcggcggggtaggcgatcgtgatgaagaagccctgctgcggtttagccgcggcgccgaggagcaggcgcgcaaagccgcgcaggccttgggctactatcagccactgatcgaaagcgatgtgaagggcggcaagaacccgcgcctgatcctcaccatcgaccccggcgaaccggtgcatttgcgcgacgtgaccattcgggtcgatggccaggccgccgacctcaaatcctttcgcgtgcctgccggcgacgacctcaagcccggcgccgtgctcaaccacggccattacgaagacgccaagcgcctgatccagaaccaggcctcgcgctacggttttttcagcgggcgctttacccgccaaaaactctcggtcgacccgcaggcgggcgtggccgatatcgagcttatctacgacagtggcccgcgctacaccatgggcaaggtcagctttaccggcgacacgccgtttgatgaagacctattgcaacgcatggtgccgttcaagagcggcacgccttacgactccgaactgatcgccgaacttaaccagaacctgcaaggcagcggcttctttgagggcgtgcgcgtggacgcagcgcctgccgcttcggccaacgatgtgattccggtggcggtgcagctggagacgcgcaagccgcgcaccatgggcctgggcctggggtattcgaccgacgtcggcccgcgcggcaaagccaactggacgcggcactgggtcaacccccaaggccacagttatggctgggaagccgaactgtcggcgccgcggcagaacgtcggcctgtggtatgacatcccgctcgacccgccactgaccgacaaattgcgcttcgccggcggctaccagaatgaagaactggccaacagtgacacgttgagtaaattgctcaccttgggcccggagtggcacagcaaattgcccagtggctggacccgcatcatctcgctcaaataccagcgcgaagaataccgcgagggcaacgactcgggcctgagcaacctggtcatgccgggtatcaattattcctacctgcgcagtgataaccgcattgacccgcacaatggttatcgcctcgcgttcgacgccaaggtcgccaaagagggcctgggctcagacaccaacctgctttatggcacggccacggtgaaaggcttgaccaccttgtgggacaaccaccgcttcctcggccgtgcccagtttggcggcagcgccactaacggttacaagtcgataccgccgtcattgcgtttctttgccggtggtgatcaaagcgtgcgtggttacgaataccagaccctgtcccccgaaaatgatcgcggcgaccgtatcggcggccgctacatggtggccttgagcgccgagtatcaatattccattaccgataaatggcggatcgcgacctttatcgaccagggcaattcctttaataccctcgacctgcccagcctgaaaaccggcgttggcgtcggcgtgcgctgggtctcgccggtcggtccgattcgccttgatttggcccatgccctggaagacccgggcggcattcgattgcacttttccatggggcctgagctgtgatgcgtggtttgaaaatagcggggctggccgtggtggctgtcctagccttgatactgctggcgctgtggacggtgctcggcacccaagcgggcagccgctgggcgttgggccaggtgccgggtgtgacggtggagaatttccagggccacctgggtggccaatggagtgccgaccatctggtgtggcagcaggatgccagccgggtcgaactcaacgcgccgaagtttgattggtcgcccgcgtgcctgctgcgcatgacgttgtgcatcaatcaactggaggtggagcaggtcagcttgcaattccctcctggcaccgagcagagcagtgggccgattcaattgcccgagttgaaactgcccgttgccatccagttgggcgacgttcgcgtcggcagcctgctgtttaacggcagcgaagaactcaagggcctgcaactggcggcgcactggaccgccgccggcctgcagattgactccgtgcacctgcaacgtgacggcctggtgctgaacctaaacggcttgctgcaacccaccggcgactggccactcaatgccaccggtgacctgagcctgccatacgcccccgccggcgcgccttggaaccttgcgctcaaggtcgagggcgacctgctcaaaacgctcaagcttgatgccgacagcagtggttatctgcccgccaaactgacaggcgagttgcaacccctggtggaaaacctgcccgcgcaattgcacatcacttccgacagcttcaaacccagcgccgacctgcccgataccttgcaactcaacgggctggacctcacggccaaaggtgacctgaaaagcggttaccaactgctgggcaaggctgtgttgcctgcggaaaaaggcccggtggatttgttgctgcaaggcaaggtcgacgccaaaggcgcgcagatcgccggcctggacctgaatgccggtgacaaacaaagcctcaagctcagcgccaacctggactggcagcaaggctttagcgccgacgccaaaatcgcctggctggattttccctggcatcgcctctatccgttgatcgacgagccgcaggtcagcttgcgcaccttcaatggcgaggtttcctacaaggacggcaactacctcggcaacctgaatgccgacctcgatggcccggccggcaagttcaatgtgatcacgccgttcagtggcgacctcaagcaaatcttcctgcccgagctgaaattgaccgctggccaaggcaaggctgaaggccatttgaatgtgcagttcgccgacggcattgcctgggatacggcgctggacctgtcggcgctgaacccggcgtactgggtggccgaattgccgggcacattggccgggccgttgcgcagcaagggcgagttcaagaatgaacagctcaagctgaacgccgaccttgacctcaagggccgtttgcgcggccaaactgctgtgttggcggccaaggccgaaggcgcgggtgagcaatggaccctcgccaacctggatatccgcctgggcgacaaccgcatcaatggcagcggcagcctgcagcagcggctggccgggcaggtcgatatcaagctcgcgcgcttggcccagttgtggccgcaattgcgcgggcaaatcaatggccgcctggatgtcgccggcagcctgaaagcgccgcaaggcaagctggacctcaaaggccagcaactggccttcgccgacaaccaactgcaaaacctgaccctcgatgcgagtttggataacgcccagcgcgccaggatcgacctcaagggcagcggcatccaggccggtgagacccaggtcggcaccctgaccgccagcgcccagggcgatatcaagagccagaaagtccagctcgacctggccgggcctctggtcaagctcgccctggcgctggacggcaacctcgacaagggcaattggcgcggccgtctggccagtggtgaggtgcaggccggaggccaggactggaagctgcaagcaccggcaaagatcgagcgcctggccgacggcaagctgacctttgctgcgcattgctgggtctccggccccgccagcctgtgcggtgaagatcagcgcctgatgcccgagccgaagctgcgttaccacctcaagcaattccccatcgacagcctggcggcgtttttgcccaaggatttcgcctggcaaggcaagctcaacgccgacgtgcaactcgacctgcccaacagcggccccaagggcgtgattgcggtggacgccagcggtggcaccttgcgcgtgaaagacaaaacccagtgggtggatttcccctacgacaccctgaagctggaaaccacgctcaaccccaagcgcatcgacacccagcttaactttcgtggcggcaaactcggcgagttgctggtgcaggcgcagatcaacccgctgccaaagaacaagccgatcaccggcaatttcaccctcaacggtcttgatctcgccgtcgcgcggccgtttgtgccgatggtggaaaaactcaatggcaaactcaacggcagtggccgtatttccggtggattgctggcgccacaggtcaacggcaacgtgaacctggtgggcggtgaggtctctgggcccgaattgccggtcagcctcgaaggcttgaatgtgcaggcgctgattgccggcgaaggcgtgcagctcaatggtgcctggcgtagtggccaggccgggcagggcagcctcaaggggcagatcgattggggccaggcgctggtggtggatttgagcctgcaaggctcgcaattgccggtcacggtggagccctatgcggtgctggaggtggcgcccgacctcaagatcagcttgaagaacgacaagctcgcgattgccggcaaagtgcagatcccgcgtggcgagatcaccgtgcgcgaattgccgccgtcaaccgtcaaggtctcggatgacaccgtgatcgtcggcagccagaccgaagagggcaagccgccgatggcgatggccatggatatcgacgtggtggtgggcgaagacaagctcagcttctcgggctttggcctgacggccaaggtgcagggccacgtgcatatcggcgacaacatggacacccgcggcgagctgtggctcaacgacggccgctaccgcgcctacggccaacggcttgacgtgcgccgtgcgcgcctgctgttcgccgggccgcttgatcagccttatctggatatcgaagccatccgcaagaccgatgacgttaccgctggcatccgcctgagcggcagcgccgagcagccgaccacgcagatcttttccgaacctgcgatgagccaggagcaggcgctgtcctacctggtgctgggccgtccgctgagtaccacaggtgaagacaacaacatgcttgcccaggcggcgctgggtcttggcctgatgggcagcgccggggtgacttcggacattgccaacaagctgggcattcaggacttcgacctcgacacccagggcagcggcaacaacaccgccgtggtggccagcggcaagatcactgaaaagctcagcctgcgttacggggtgggggtattcgaaccggccaacaccatcgcgttgcgctatctgttgagcaagaaggtgtatctggaagtggccagcggtgtggccagttcgctggatatcttctacaagcgggatttctaaagcccgtacgcggtaaaaaactgtgggagctggcttgcctgcgattacggtccatcagtcgatgattcattggctggcagaccgctatcgcaggcaagcgagctcccacagttgtttgcatcccattccgcctgtcgcgaaaataccaagcaagctaataattccatttgacattcgctgcctaagcagtaacatcttgtcatacattcactgcctaggcagtaataaggtgacttccgatgacccactacacccctgacagctttcgcaattgccacctcggcctgctgctgggccgtgctgcgctgctcaaggaccgcatcatcgacacccatatggagccccacggcgtcaccgccgcgcagttcaaggtgttgatcatcattgcccagttcgacatcgatacccctgccgagctgtgccgcaacctgtccctggacagcggttcgatgacacgcatgctcgaccgccttgagcaaaaaggcctgctggcgcgcaaacgttccgagctggaccggcgtcaggtgcagttggtgctcaccgaagacggccagcgcctggcagacatgctgccgcacatcggcgcgcagtcgatgaatgagttggccggtgccctggcgcccggtgagttacaaaccctggaagccattctcacaaaaattctggtagctgccggtgacgccatcgtcatcgagcgggtaggtaatcaatgaacacacgcgcactgagccttgtgctggtggcgatgacgttggccggttgtgccaacttcagcggcctggacacccaaggcaaacgcctcgacgccaacagcctgcaaaccggtaagtccttgagcggcgtcaccctgacgaacgctgcgtggccaaccgccgattggtggaagagcctgggcgacccgcaactcgatggcttgattgccgaggccctgcaaaacagccctgacatgcaagtcgccagcgcccgtgcccatcaggccgaagccgccgcctatgctgcgaatgccgcacgcttgccgaccctggatgccagcgccggcgtgagccggtcgcgcctggccaaggatcaggacccgcgtggcgagggtgatgcctacgccaccgtgcgtaacatcggcgccagcttcaattacaacttcgacctctggggtggccagcgtgccgcctgggaggccgcgctgggtgaggcccgcgccgccgaagtcgatcagcaagccgcgcgcctgaccctggccgccaatgttgccaaggcttacagcgacctgggccaggcccacatcgtgcgcgacctggccaatgacgacctcaagcgcactcgccagatgctcgacctgagcaagcgtcgcctgaactcgggtatcgacagcgaataccaataccaacagaccgaaagcctggaagccagctcccagtcgcaactgatcgacgcggaaaagcaactgcaaagcgccaaaatcaccctggccgtattgctcggcaaaggcccggaccgcggcagtgagctggtgcgcccgaacgtgctcaagcccagcgctgtggctgtgccgtcggtactgccggccgagctgctgggccggcgcccggacctgatcgccgcgcgctggcgcgtggaggctgcgagcaaaaacgtggccgcgagcaaaacccgcttctaccccaacctcaacctgagcgcgagcgccggggcggagtcgttgctgggtgatgcgatgtttgggtcggccagccgtttcttcagcattgcgccgacgatctcgttgccgatcttcgacggtggccgtttgcgcgccgacctcgatgcgcgcgacgccgattacgacctggcggtggcccagtacaacaagaccctggtgcaagccctgggtgatatcggcaacagcctggtgcagttgcgtgaaaccgggcgccagatccaggcgcagcaacacgccgcagacatcgcccagcagtcttacgacaccggcgtgcagcgttacagctccggcatcggtaactacctggatgtgctcagcatcgagcagcaactgctgcaagcccagcgccagctggcgacgctgaatgccgcgcagatcgatctgtcgattcaattgatgcaagccctgggtggcgggttcaacgccgataacgtggccgcgaccacgacccgtcccgccacccgtacggaataatttgaggtatttgtcatggccactgccgaaagcaacaccccggaacaacccaaagcagacagcaacccgcgcaaacgcaaagtcctgctgatcggcctggcgctgatcgtcatcctgtgtggtgtgggcgtatggggctggtacgaattttacgggcgcttcagcgaaagcaccgatgacgcctacgtgaacggcaacgtggtggaaatcaccccgttggtcaccggcaccgtagtcagcatcggtgctgacgatggcgacctggtccatgaaggccaggtgctgatcaacttcgacccgaatgacgccgccgtcggcctgcaaagtgctcaggccaacctggcccgcaccgtgcgccaggtgcgtgggctgtacagcaatgtcgatggcatgaaagcccaggtcaatgcacagaaagctgacgtgcaaaccgcccaggacaatttcaatcgccgtaaaaccctggcccagggcggggcgatttctcaggaagaactgtcccacgcccgtgacagcctgacggcggcgaagaatgcgctgaccaaccttgagcaacaattgaaaaccaccaacgccttggtggatgacaccgtgatctcgtcccacccggacgtgcaagccgccgctgcgcaactgcgccaggcttacctgaccaacgcgcgcagcaccttgattgcacccgtcaccggctacgtagccaagcgcaccgtgcaactgggccagcgtgtgcagccgggtaccgcattgatggccgtcatcccgctgaaccagttgtggatcgatgccaacttcaaggaaacgcagctgcgtgacatgcgcatcggccagccggtggacatcgaagcagacatctacggcagcgacgtgaaattcagcggcacggtcgacagcctcggcgccggtaccggcagcgcgtttgccctgttgcctgcgcagaacgccaccggtaactggatcaagatcgtgcaacgggtgccggtgcgcattcatatcaacgccgaggaattggccaagaacccgctgcgcgtcggcttgagtactgtggtcaaggttgacctgcatgaccaaagcggcccggtactggcgcaacaggcccctcaaaaggcttcgttcaccacagacgtatacgaccgccaactggccgaagccgacgccatgatcacgcagttgatccatgacaacagcagtgccgccacgcccaaggctgtgcaacgctaatgagcaataacgcctccttcacgccacccagcctgttgatggccactattggcctgtcgctggcgacctttatgcaggtgctcgacaccaccatcgccaacgtggcgttgccgaccatttccggcaacctgggcgtgagttcggagcagggtacctgggtcatcacctcgtttgcggtgagcaacgccattgccttgccactgaccggctggttgagccgccggtttggtgaggtgaagctgttcctgtgggcgacgatgctgtttgtactggcgtcgtttctctgtggtatttccacctcgatgcccgagctgatcggtttccgggtgctgcaaggcttggtagcggggccgttgtacccgatgacccagaccctgctgattgcggtctacccgcccgcgaggcgcggcatggccctggcgttgctggcgatggtcacggtagtggcgccgattgccgggccgattctgggtggctggatcaccgacagctacagctggccgtggatctttttcattaacgtccccatcggcattttcgcggtgatggtggtgcgttcgcaactgaaaaaacgccccgtggtcaccagttaccaacccatggattacgtcgggctgctgagcttgatcgtcggtgtcggcgccttgcagatcattctcgacaagggcaatgacctggactggttcgaatccaacttcatcatcattggcgcagcgatttcggtgatcgccctggcggtgttcattatctgggagctgactgacaagcacccggtggtcaacctgaggttgttcgcctaccgcaacttccgcatcggcaccatcgtgttgattcttggctacgcaggctttttcggcatcaacctgatcctgccgcaatggctgcaaacccagatgggctacaccgcgacctgggcgggcctggcagtggcgccgatcggtattctgccggtgctgatgtcgccttttgtcggcaaatatgcgcacaagttcgacctgcgcctgttggcgggcctggcgttcctggcgattggcttgagctgctttatgcgcgccggcttcaccaatcaagtcgacttccagcacatcgccttggtgcaactgttcatgggtatcggcgtggcgctgttctttatgccgactttgagcatcctgatgtccgacctgccaccggcacaaatcgccgacggtgcgggcctggccaccttcctgcggaccctgggcggcagcttcgcggcttcgttgaccacctggatctggattcgccgggcggaccagcaccatgcgtacatgagcgagaacatgaccacctacgattcggcgacccgcgacgccttgcaggcgctgggtggggcagggcacaaagcgtacgcgcagctggaccagatcctcaccagccaggcgtacatgatgtccaccgtggattacttcacgttgctgggctggatgttcatgggcttgatgttgctggtgtggctggcgaaaccgccgtttggcgccaaggccgggccggaggcgtcaggccactgatctgccagcagtgaactgcaatcaactgtgggggctggcgtgtgtgggagctggcttgcctgcgatagcatcacctcggtgcatcagatgtaccgaggtgtctgcatcgcaggcaagccagctcccacattttgttcagtgttgaggcgaagttcaggccccaggcagtgccaactgcgagttcacaaaatcaaacgccgccaattgaaacccttgctcatccacctgcagcgcccagccctgcttgtcccagtcccccagcacaatacgcttggccgcctgatcaccaatctgcaacttatgaatggccgggcggtgcgtatggccgtgcaccagggtgcgcacgccgaactgctgcatcacccgcggcacttcctcgggcgtcacatcaacaatgtcattggccttcatgcgcgtttgcgcacggctttcgctgcgcagcttgcgcgccagcttgtggcgggtgctcagaggcaggtggcgcaggatgaacagcacaatcgggttacgcaggatgcgccgcagcttcatatagccgaggtcgcgggtgcagaggctgtcgccgtgcatcaacagcacaggctcgccgtaaaactgcacgacactcgggtccttgagcaaacgggcgcctgctgctctgcagaacgctttgccgatcaggaaatcgcggttgccgtgcatgatgaaaatctgggtgccgctgtcgctcagctcacgcagagcctcgccaatcgaacgctggaagggggtcatgccatcatcgccaatccaggcttcaaagaagtcccccagaatgtacaacgcctgggcgccacgggcgcggccgtggagcagatccagaaacgcccgggtgatgtccgggcgctcctcttccagatgcaagtctgaaataagcagtatcacgcttagatgatctcggctttctcgacgataacgtcttctaccggaacgtcctggtgaccggctttaccggtggtctgcacgcctttgatcttgtcgacgacgtcctggccttcggtcactttaccgaataccgcgtagccccaaccctgcacgttcttgccgctgtggttcaggaaggcgttgtcggccacgttgatgaagaactgcgcagaggccgaatgcggctccatggtacgggccatggcgacggtgtacttgtcgttggaaaggccgttgtccgcttcgttctggatgcttgggcgcttgtctttcttttctttcatgccaggctcgaaaccgccgccctggaccatgaagttaccgatcacgcggtggaaaacggtgttttcgtagtggccggcgtttacgtattcgatgaagttggcgacggtgatcggcgctttctcggcgttcagctcgatgacgatgtcaccgtggttggtggtcagtttgacttgagtcatggtcgtttctctttcaaggaattcgtgggtgtggacgccggggcgccttaccggtttggcgaaacttctttggcaaaccttcggccaaggcgcgcagtttagcgtgcccggcaggaatttcgaggtggttttttaccgccggtgcattaaatgcagcagttttcggcctcgctctgtcaggtacttgacagcatcagctatgatatcgcctttgttttatctggcctgacccggccacgtacctgtctgttcaaggatcctatgagcaagcccactgtcgaccctacctcgaattccaaggccggacctgctgtcccggtcaatttcctgcgcccgatcatccaggcggacctggattcgggcaagcacacgcagatcgtcacccgtttcccgccagagcccaacggctacctgcacatcggtcacgccaagtcgatctgtgtgaacttcggcctggcccaggagttcggtggcgtcacgcacctgcgtttcgacgacaccaacccggccaaggaagaccaggaatacatcgacgccatcgaaagcgacatcaagtggctgggcttcgaatggtccggtgaagtgcgctatgcatccaagtatttcgaccaattgttcgactgggctgtcgagctgatcaaggccggcaaggcctacgtcgacgacctgagcccggaacaggccaaggaataccgtggcacgctgaccgagccaggcaagaacagcccgttccgcgaccgttcggtggaagagaacctggactggttcgcccgcatgcgcgccggtgagttcccggacggcgcccgcgtactgcgtgcgaagatcgacatggcctcgccgaacatgaacctgcgcgacccgatcatgtaccgcatccgccacgcccatcaccatcaaaccggtgacaagtggtgcatctaccccaactacgacttcacccacggtcagtcggacgccatcgaaggcatcacccactccatctgcaccctggagttcgaaagccatcgcccgctgtacgaatggttcctggacagcctgccggtaccggcgcacccgcgtcagtacgagttcagccgcctgaacctgaactacaccatcaccagcaagcgcaagctcaagcgactggtcgatgaaaagcacgtacacggctgggacgacccgcgcatgtccacgctgtcgggtttccgtcgccgtggctacacgcctgcctcgatccgcaacttctgcgacatggtcggcaccaaccgttccgacggcgtggttgacttcggcatgctcgaattcagcatccgccaggacctcgacgccaacgccccgcgcgccatgtgcgtgctgcgcccgttgaaagtcgtgatcaccaactacccggaaggcaaggtcgacaaccttgagctgccacgtcatccgcaaaacgaagcactcggcgtgcgcaagctgccgttcgcccgtgaaatctacatcgaccgcgatgacttcatggaagagccgccaaaaggctacaagcgcctggagcccaatggcgaagtgcgcctgcgtggcagctatgtgattcgtgctgacgaagcgatcaaggacgccgatggcaacatcgtcgaactgcgttgctcctacgaccccgaaaccctcggtaaaaaccctgaaggccgcaaggtcaagggcgtgatccactgggtgccggccgctgccagcatcgagtgcgaagtgcgcctgtacgatcgcctgttccgttcgccgaaccctgaaaaggccgaagacagcgcgagtttcctcgacaacatcaaccctgactccctgcaagtcctcactggttgtcgtgccgaaccctcgttgggcgaagcacagccggaagaccgtttccagttcgagcgcgaaggatacttttgcgcggatatcaaggactcgaaacctggtcagccggtattcaaccgtaccgtgaccttgcgtgattcgtggggccagtgattcagtctaaggaattgtcgtgctaacgatttacaacacactcagcaagaccaaagaagtcttcaagccgctggatggcaacaaggtgcgcatgtacgtgtgcggcatgaccgtgtacgactactgccacatcggccacggccgcagcatggtggccttcgacctggtgacgcgctggttgcggttcagcggttatgacttgacctatgtgcgcaacatcaccgacatcgaagacaagatcatcaaccgggcgcgcgagaacggcgaaccgttcgatgtgttgaccgagcgcatgatcaccgcgatgcacgaggatgaagcgcgtctgaacatcctgaaaccggacatggaaccgcgtgccacggaccacattccgggcatgctgagcatgatccagaccctgatcgacaagggttacgcctacgccccgggcaatggcgacgtgtactaccgcgtcgccaaattcatgggctacggcaagctgtcgcgcaagaaaatcgaagacctgcgcatcggtgcacgcatcgaagtcgacgaagccaagcaggacccgctcgacttcgtgctgtggaaaggcaccaagccgggcgagccgagctgggagtcgccatggggcgccgggcgcccgggctggcacatcgaatgctcggtcatgtccacctgctgcctgggtgacaccttcgacattcatggcggcggcagcgacctcgagttcccgcaccacgaaaacgaaatcgcccaaagcgaagccgccaccggcaagacctacgccaacgcgtggatgcattgcggcatgatccgcatcaatggcgagaagatgtccaagtccttgaacaacttcttcaccattcgtgacgtgctggaaaagtaccacccggaagtggtgcgctacctgctggtgtccagccactaccgcagcgccatcaactattcggaagacaacctcaaggacgccaagggcgccctggagcgtttctaccacgcgttgaaaggcttgccatccgtggcgcctgccggcggcgaagcctttgtggcccgctttaccgaagtcatgaacgacgacttcggcaccccggaagcctgcgccgtgctgttcgagatggtgcgcgagatcaaccgcctgcgtgagactgatctcgacgcggcggccggtctggcagcgcgcttgaaagaactggcgagcgtgctcggtgttctgcaaatgaagcccgaggacttcctgcaagccggcgccgaagggcgtgtggatgcggctgaagtggacgcgctgatccaggcgcgtttggccgcgcgtaccaataaagactgggcggaatccgaccgtatccgcgaccaactcaccgccatgggcgtggtgttggaagacggcaagggtgggacgacgtggcggttggcggatcaggtctgatcggtaaacgctgaatgaaaaacgccccgactggttcggggcgttttttttgcacatcgttttaacggcccactcgatcaaactgtgggagctggcttgcctgcgatggcggtgggtcggcttgcacatcagtgactgatagaccgctatcgcaggctagccagctcccacattttttaccgtgcccactttgcgaaattttcggatgggtgcagcgagcctacagcaagtatggaactgtcaacgcctgctctaccacagaatgcgtcggagccctctaaggctcgtcaatccgtcggagagttataagatgttgaactcagcagtgacagggatgatggtcaggggcgtcggatatgcgccaaatgcagggcggtcggaatccggccctgttgtatctgcgacggatgtcgcggcagtgaagcaactggtgaatgagctgtcccatgcgatgcgccatgccaaggctcaagcagcgcgaaacctctctgagaagctgaaggtccttcacgacaaggccggcggcggcacgttcaagaacgatctccacaagctggttcaaaccctggaaggttatgtagcgtccctgacggcagctcatcaacctccacagcaggtttttacgcatgcgcgcgacttgcctcagcccagaacaaagcgtgatctgggccagcagcgttattctttcaaccaacccacactacgtgggccgcaatacacaaatcacagggcctacagtgagccggtaagccgttatgactactacaccgacacccgcaaccccgatagaaggcccggagtgggtaatgagtacggcaatatctggagtggtttctaccaagggccgagcaaagggaactgcgttacggttgcagcgataaaggccgcaatgatgcggtttggccagaaacctacggatattttcaaccatgtgaaggcggcgggtgatggctataacgtcgagatgcgcgatgggttcaggcttcatttatcccacaatgagttagcacaggctgcttatcgagccgatttcagggggcatgattcggcaatgctcgcggatgctcattttttgtatgcggcgagtgccaaacgggcgcaactggagaataacgacggttacgccagtgcagggttcggccaggctatgtttagcctcaatgatggtgaagatgggtatgaagggatgcagcgtttaggcttgaacgcttacattcgagtcaccactgtccagaacctggcgagcgggcaaattggcgcggtgactcacggcgttcaaataggtgatcaggtttttggtcactccctggccgttatcaatgggcgagaggatgtgtggggcaaacaaggcgggtatccacccaccaatatttacgcaaacgcactggctctggtttgatgggccgctgagcccggtcattgacgccctggcaggttcagcgcgttttgggcagcggattgtttggccgagatacttgatacacactttggacaaaaccattgtgcgacacctgcgtgtcgatatggcgaagatcgcgctcgctgccgaccatgctgaacaacgtaatcccttgccccagcagcagcggaattcgggtaatgatcaattcatcgatcaagcccgcttcaagatacgactgaatggtctgcccgccgtcgatgtacagatgcttcatgccgcgcccggctaactgtgctgcgagcgcagccgcgccgaggttcatcacttcgactttgccctgtaaatgctttggaatgtctacgctctgtcgagacagcgcaatgacgggcacgccctcataaggccactgcgcaaacgacaagactttctccagggttttacggcccatcaccagtgcatccactgttgcgatgaagcgttcataggtcacgcccttcaattcggcggttccatattcgggccgatgaagccattcgatatcgccgtctggccgggcaataaacccgtcgaggctggtggctataaagacggaacatttgatatccatgccagatacaactccttaagcagataacccatcagggctttgaactgatcgcgcgtatcgcaaacgccgcgatactcctctgttgctcaacactggcgccgcccttgccggcgattttcataccgctgagagtggccatcagaaagtcacacgccccagccaggtcgatgccgggcgccaactccccctgtgccagtgcctgcttcaaggtttgttcgaatgcacggcgcaggcgctcggtactgtgagcggtgagttgattaatctcgtcatcttccaggccgaactcgcagatggcattgatgcccatgcaccctgtggtgccttcgcgcaagatgcgggtggcgaaggagtgcagtgtatcgtgcagggcttgcagcgctgtcgggcctgcggccagacgctcaagcaactcgtcgacgccccgacgctgatactcggccatggcctgcaggtacagctggcgtttgtcgccgaaggcgttgtacatgctctggcggctgagccccatggcctgcatcagttcctcggtggaggctgcggcaaaacccttgtcgcagaacacacgaatggcgtgttgcagcacctggtcgcggtcgaatgctctgggtcttgccatggggtacctctgaaaaatgaaaggtcaggccaggtagccgccgtcgatgctcaggcttgaaccagtcacaaaggccgcttcctcggatgccaggtaggcgaccatgccggcgatgtcatcgggagtgcccagacggcccagcggcaccaggctcttgatcagttctgcatgggggccgtcggcggggttcatgtcagtgctgatcggcccaggctggacgttattcacggtaatcccgcgtggggcgaaatcaatggccaggccgcggatcataccggcgatcgccgccttcgtcatgctgtagacgctggagcccgggaaggcggagcgctgcgcgaccacgctgcccacggtgatgattcggtcaccggcctgcatcaccggtgagcacgctttggctgccgcaaaggtggcgcggacgttgatcgcgaacatccggtcgaaatcctccaggctgaacacctcgacactgcccaactgcaggatgccagcgttgttgaccagaatattcaacgcgccgaaacgttcaacggtcgcggccactgcccgctcgagcgcgacggcgtccgcgctgtcggcctgaatcgccagcgctttgccgccttcgctttcgatctggcttaccagtgccagcgccttgtccgaggaggaggagtaggtgaacgcaaccgctgcaccttcgacagccagtcgacggacgatagcttcgccaatgccgcgggagccgccagtgaccagggcgactttgctgctgaaacgaggagtaggggtagtcatggaagagagcctgattttagtggattaaataatccactaaaacgtaacaggctcgaagaggcgcgccaagcttattttggattaattaatctttaacacccattgcctgctcgagaaacagcgccgcgttcttcagcgcctgcatgccctcgggcaaaatcgccgcaaacagatgccagacgtggaacatgccgggccacacctccagcgacacacgtacccggttttcccccaaatgggtggccaggcgcatggcgtcgctgagcatgacttcgttttcgccgatctgtaccagtatcggcggcaacccccggacgtccgcaaataccggcgatgcatcagggttattcggcagtgcgccattgagaaacgctttggcgagcagtgtcagccccgcgcgggaggcttgcgggtcgaggccgtcccggttgtcgagagaggcgccggtgtgttccaggttggcccacggcgacaacgcagcgccgccggcgggtagcggcaagcctgcgttgcgggccttgaccatcaccgacacgaccatcgcgccgccggccgagtcgcccgagaatacgatggacttggggtcgttgccctggtcgagcagccagcaataggcctgcaatgtgtcatcgatgggcagcggaaacggatgctcaggcgccaggcggtaatcaggcagatagaccttggcgcccagcagtttggcgaagtgcccggcaaggcccagataaccccgtgggctgccgccgacataaccaccgccgtggatgtacagcaacacccgatcaccctcaagcccgtcaggcaccaccaccatgcccggcacaccgcccatgtcgacctcatgaaaacgcacgccggcgggaaccggatgagcgcacagcacctgctcgtaagccttgcgctgttcatcgagggtgagggcggttttctggcctgtgagaaagggcccgaagtccgcggcggatgcaacccaggcatcgagacgggcctggacaagggaagtgaatgccatggaaagaacctcataaagtgaccccgataccgggattagcgattgaggttctattttatgggttctattgaagaacgaatttcaccactgaagcgcctggcgggatcaactgccgctgtcagtccggcggctgctgacttcagccggcacatcatccccggccatgcgcttgcggaacaacgcagtcctcgccagcagcagcgtggtcaccggcaccgtgatcgacaataaaaccggaatcagccagccgtgcaacaccggcccggatttgagcaccgaaaagtagatgatcgaggccagcgccacacaccatgcgcccagcgtcgaggccagtgccggcggatgcatgcgctggaaaaagtccttcaggcgcagtaaccccaccgcaccaatcagcgcaaatacgctgcttagcagcagcagcaccgccacgaccacttcaacccatagcggcatcattcaatcacctcgccacgcagcaggaatttcgccagggcaaacgagccgacgaagccgaacagcgcgatcagcagcgccgcttcaaagtaggtgtcactggcatagcgaatgccgagcaccagcatcatcagcatggccaggatgtacaggtaatccagcgccagtacccggtcctgggccgaggggcctttgaacaggcgcaccagggtcagcaccatggccagggagaacaggaacaggctgaacaggatcgcattggagagcagggcgctcattcgaagatctccatcaggggccgctcgtaggcggtcttgaaatgctcgataaacggcgcttcatcctccagatcgaatacgtgcaacaacaggatgctgcggtccagcgccagttccgaccagatggtgccaggcaccacggtcgtaatcatcgacaacgcggcgaggccgttcggatcgcgcaggtccagggggattttgatgaagcgtgagcgtggcgggcgggagccgcaggtcaatacgccccaggccacttgcaggttggagacgatcacatcgcggcccaccaggaaaaacaggcggatgatcacgccaggccggcggatgcggatcggcaatgggcgcagcggcgccatcagcagtggtgcgagaaagcccagcagcgcgcccaataacaggttgccggggctcactgacaggttcagcaccagccacaacaaccacaaggccagtgacagccatggcgcagggaacaagcgtttcatggctgcacctccagcatggcggccttggcttcagggctcgggaccgggcgcgtagccatgacggccatcacgtagtgttccgggttgttcaggctgtcggcggtggcttgggtgtagcgcatcagtggttccgccttgaaggtcagcaggatgctcaagcccagcaggaagaaaatcggcacgcactcatagcgacgcagcagcggtgaggggcgttcttcgggggtccagaaacgctggataccgaggcgggcgaaggcgatcagcgaggccaggccggacaggatgagcaacgccaccagcccccaggcagcaggccggatcggctcatccacactgacgccaagccccattggattgaccagcgcactcaacaggctgagtttgccgataaacccggacaatggcggcatgccgatgatcagcagggcgcaggcgataaagctcaagccaaggaacgccatggtccaggggatcacctggccgaccacggctttctgctcgtcatcaaggtttaccccagggcgcgggtgcaaggactccatcgctttgggcagcgcatcgatttcttcatccagcggcagatcattggccgagcgcgaacgctcgatcaattcggccagcaggaacagtgcgctcaaggccagggtcgagctgaccaggtagaacagcgcaccggccgtcaggctcggctgagcaaaaccgacgcaggacagcaaaatccccgccgacaccagaatgctcaggctggccatacgctccaaacgttgcgccgccaccatcgccagggcggcgcagatgatcgtggccataccgccatacaccagccagtcgccgccaaacagcgccgaggcaccggcctggccggagaacagcaaggtccacaagcgcagcacggtgtacacacccaccttggtcatgatcgcaaacatcgccgccaccggcgcgctggccgaggagtaggcgggtgccagccagaagttcagcggccacatgccggctttggccaggaacgctgtcgcgaggatcgccgcacccgcatgcagcaggccgcgatcagcctccggcaccaacgggattttcaatgccaggtcggcaaagttcagcgtgccggtcaccccgtagatcatcgccgcgccaatcaaaaacagcgacgacgccaacaggttgatcgcgatgtagtgcagcccggacgatacccgtgcgcggcctgagccatgcagcatcaagccgtaggacgccgccagcagcacctcgaagaacacgaacaggttgaacaggtcggcggtcaggaaggcaccgtacaaacccatcatctggatctggaacaacgcatgaaagctggtgcccgcgcggtcccagcgcgccatggcgaacagcagcgcactcacgccaataatgccggtgagcaccagcatcagtgcggacaactggtccaccaccagcacgatgccgaacggcacttgccagttgcccggcaggtaaacgccaatcgaaccggggccgcctttttgcgtccagtacaacagcagaatcgcgatgcccaggccgagcaggctggagatcagattgatctgtgccttgagcggccggcgcttttcgcccagcatcagcatcagggcggcggtcagcaagggcagcaggatcggcgcgacgatcagttggttgacccaattcattccttgggctcccggccgtcgacgtggtccgtgccggtcaggccccgggaagcgagcaacaccaccaggaacaaggcggtcatggcgaagctgatcacgatggcggtcagcaccagcgcctggggcagcgggtcggtatagttgagcaggtcttgcggcacaccgtccttgatgatcggctctttgccgatgaacaggctgcccatgctgaaaatgaacaggttgaccccgtacgacagcaggcacaggcccattaccacctggaatgtacgtggccgcaaaatcagccagacgccagaggccgccaggactccaatggcaattgcgatgacttcttccatcaggcggctccttccgttgcggcaacggccttggcctggttgctcggtttatgggcccgcacggactggtggccgagggcggtgagcatcagcagcgtggagcccacgaccatggcgtacacgccgacgtcgaagaacagggcgctggcgatatggatatcgcccagcaccggcaagctgaaatgccaggtatgggtggtgaggaacgggtaaccggcaaacagtgcgccgagcccggtcagggtcgccgagaacagaccgaagcccatccagcgcatcggccgcaggctcatctgtgcctcgacccactgcgtaccggcgaccatgtattgcaggataaacgccaccgacatcaccaacccggcgacaaagccgccccccggttggttatggccgcgcatgaacaggtagaacgacaccaccagcgcaatcggcagcagcaggcgcaccagtgctgccggcaccatcatgaagcccagtgcggtgtcactggcctggcgcgggttgaccaggtcggtggccacatccggtgccagttggcgctgttgcgcgggcagttgcatgctttccttggacgggcggaagcggcgcaacagggcgtacaccgtcagcgccacggcgccgagtacggtgatttcgccgagggtgtcgaacccgcgaaaatccaccagcatgacgttcactacgttgctgccgccgccttcgggcagggcgcggctcaagtagaacgaggaaatgtcattgggtgtctggcgggtcagcatcgcgtaggacagcagcgccatgccgccgccgaccacggtcgacagcaggaagtcacgcagacggcggatgcgcgctttgcgcagtgagcttggcaggggcgagacctcttcgatccgccgtggcaaccagcgcaggcccagcaggatcagcacggtggtgaccacctcgaccaccagttgggtcagcgccaggtccggtgccgagaaccatacgaaggtgatgcacgtcatcagcccgcacacgctgaccatggtcagggctgccagccggtggtatttggcttgccaggcggcgcccagggcgcaggcgattgccagcagccacagggtcacgaacacgatggaacccggaatcttcggccggtcgccccagctgaggccgctgttgatcatcgggatcacgcctgcgatcactgccgccagcaccagcaggaacaactgggtttgcaggcgcttggtgctgatgcgcttctcgatcttgcgtacgccgcgcatcatcaccaccaggcagcgctcgaaaccgcgcttgccattgaagtagctgatcagcggcgggtatttgaagcgcccgcgcttgagttgcttgcgcagcagcaggtacagcaccacaccgcaactcatggccaccaggctcatgatcatcggcgcattccagccgtgccagatggccaggctgtattcgggcagcacaccgccgaccacgggcaaggctgcggcggcgaggatcgagccgaccacctgggccgggaaaatgcccaccagcaggcaagtgaacaccagcaattcgaccggtgcgcgcatccagcgcggcggctcatgtggcgtgtgcggcaggttggtggcggtggggccgaagaacacgtcgacggtaaaccgtagcgcgtagaccacgctgaaggtgccggcgatggtcgcgatcaccggcaaggcaaactccacccaggcggtggacgagataaatacggtttcggcgaagaacatttccttggacaggaaaccgttaagcaacggtacgccagccatcgcggcgctggcgaccatcgccagggtggcggtaaacgggatcaaccgcaccaggccgctgagtttgcggatgtcgcgggtgccgctttcgtggtcgatgataccggcagccatgaacagcgaggctttgaaggttgcgtggttgaggatgtggaacacggcggcgacggcggccagcgggctgttcaggcccagcaacagagtgatcaaacccaagtggctgatagtggaataggccaggaggcccttgaggtcgttctgaaagatggcgcagtaagcgccgaggagcagggtaatcgcgccggcaccgccgacgatatagaaccattcttcgctgccggacagcgacggccacaggcgggccagcaggaacacgccggccttcaccatcgttgccgaatgcaggtacgccgaaaccggcgtgggggccgccatcgcgtggggcagccagaagtggaacgggaactgcgcgcttttgctcagcgcgccgatcaacaccagggccagcatgaccgggtatagcggatgcgcgcgaatctgatcgcccgccgccagcacctggtccaggtcgtagctgccgacgatatgccccagcagcatcacgcccgccaacaggcacaagccgccggcgccggtgaccatcaaagccatgtaggcaccgcgccgcgcatcggcgcggtggtgccaatagccgatgagcaggaaagaaaacaggctggtcaattcccagaagaacacgatctggatcaggttgccggaaatcaccagtccgagcatggcgcccatgaaggccaggaaaaacgcgaagaagcgcggcaccgggtcgtccggcgacatgtagtagcgcgcgtacaacgacaccagcgtgccgataccgaggaccagcaacgagaacaaccaggcgaaaccgtccatgcgcaacacgaagttcaagcccaggctgggcaaccacatgaattcttcgcggatcacgccaccgtgggcgatctgggggtagagcagggcgacttgaatggtgccgaccagggccacaaggccggccaacagggattcggtgttacgtgcattgtgcggcagcaaggccgccagacagctgccaatgaacggcagaagcagtagaactatcagggacataggcttctaatctgcgggagtttgggatgcatcatacgtgccgctttctcgatcaccaaacggcaacatgtggcaggatcctacaaggtaggccgaaaccccccgtttggcattgtttcaggcaccacctcccactgtgggagccgggcttgcccgcgatggcgatctgacagccaccgcaagcattgggaccctacccttgctgttcctgttccctttcgtctcgcaactcaagcgccttctgccccttggtcttcatttcactcacaatcaccgccgccacaatcaatgccgcgccgaccatcgcaatcggcgggaaacgctccccggcaatccgcccgaccacaccggcccacaccggctcaccggcataaatcaacgtggcccgcgtgggtgaaacactctgctgcgcccagttcatcgccacctggatcaccgcactggtcaagcccaggcccaccgcgctgaacagcagcagccacgagaaccccggcagcgcctcgcccatcggcaccaccatcatgaacgacagcacggaggcggtggccagttgcaccacggtcacccggcgcacatccacttgcccggcaaacgcgctgatcaaaatgatctcggcggcaatcgcgatcgcgccgatcaaggtcgcgatctcgccggggctgaaattcagcgaggccccggcaggcccggtcagcaacatcaaaccggtaaacgccagcatgatgccgatgctcggcatcaaccccgggcgacggcccagcaccagccactgtaataaaggcacaaacggcacatacagcgcggtgatgaacgccgactggctgctcaagatggtttgcaggccaatggtctgcagcccgtagccgaacatgatcgccacgccgataaataccccggctttcaactcgaacaacgtcagatcgcgcagcgctcgcaaggaaaagaaacccaccacaatcgccgccgccgcaaaccgcaggcccacgaaaaacatcgggccgctgacggtcatcgcgtgttgcaccagcaaaaaagtgccgccccagatcatggtgatcaccaccaggatgcattcggctttgctgaaacggttgaaacgaggggaagtgttcggggtggtcatggcggctcggtcttgcaagggaaaggtacggaccgcacaatgcgccgcacgctgggcagtatactgcgcacatccacccattgagcaatatagtgcacaaagaaaatccacaacgtgcttcggtgctgcaacacgtcagccagaatgtccgacggctgcgccatgctgcggacctgagccagaccgcgctatcggaaaaatccggggtcagccggcgcatgctggtggccatcgaagcgggcgaaaagaacgtcagcctgtctacgctggaccgcgtggccgaagccctggatgttgcgttcagcgacctgatccaggccccggacgcccccgaccacagccgtatcaacgagctggcctgggccggtgacatccccggcagcaaggcggtactgctggccaaagccacggcgcggcgtgaggtcgagttgtgggagatgcagttggaacccggcgatcgctacagccctgatcccgacccggaaggttggagcgtgcaactgtttgtgttcgaaggttgcctcacgctgctggtgggtgaggaagaaaagcgtgtcgctgccggtgagttttatatgttcgccagccgccacgtccatggttatcgcaatgacggcgatgtgtctgtgcgctttgtacgcaacgtggtgatctaactgttcgcctggcaacagtggatgcacactttgctggtttgaaacgcgttccaccgcgttgaatggccggcaagccgctgattttattggcgattaaattcgggcacgactcctgcaatcactcctgtatcccatcggagcctggagtcggcccatgtcagcccaccctcaacaccctgcccatatcatccgctcggacgccgaagccatcgaggtggcgacccgcctggccgcacgcttcgccgtcgaggccagcgtgcgtgaccgtgagcgccgcttgcccgtggccgaactcgacgagttttccgccagcggcctctggggtatcaccattcccaaagcctacggcggcgcccaagtgtcctatgtgacggtggccgaggtcatcaagctgatttccgccgctgacccgtcactggggcaaattccgcagaaccacttgggtgtggtggacatcctcctgcaaaccgcgactgaagcccaaaagcagcattacttcggcaaagtcctgcaaggctaccgcttcggcaatgcgttctccgaagccaaaagcaaaaacgccggcaccttcgagacgcaaatccgttttgacggcgacaccgcgcacatcaacggcgagaagttctactgcaccggcgcgctgttcgcccatatcgtgcccaccgtcggcaacaacgaaaacgaccaggcatttatcgcgtttgttgagcgtgatgcgcccggcctcagcgtgattgacagctgggatggcttcggccagcgcaccaccgccagcggtggcgtgaccctcgacggcgtggctgtgcccctgagcgcggttatcccggctcacctggcgttcgaccaacccaccgccaacggcccgatttcgcagatcatccaggccgccgtcgacaccggcatcgccctcggcgccctcgagcaggccaagatttacgctcgcctggcccgcccatggatcgacagccagcaggatcatggctggcaagacccgttcaccctcgcggccatcggcgacctggagtggcgcgttcacggcaccgaagccatcctcgccaaagccggtaaagccgtagacctggcccttgccgagccgaatgaagacaccgtggccaacgcgtcctttgttgtcgcccaggccaaagtgctctccgctgaaaccgcgttgctcgccagcagcaagctcttcgaactggccggcacccgctcggttaccggcaagcacaacctcgaccgttactggcgcaacgcgcgcacccacaccctgcacgacccggcgcgctggaaataccacctgatcggcaactttgtgctcaacggcgtaaagcctgcgcgccacgcctggaactgaggagcttgaccatgaccgcactcaacctcgcgcgccaactgctggacaacaccctgcgccatgtcggccaaagcgatgacccctatgtgatcagccgcttcggtgacctgcagatacgcgtagatgtcgccgccgctttgcttgaacgcgccgaaactcaccccggcccggtggctgcgacagaggcgcaaatcgccgccgctgaagccttgctgtttgccagtgccaccgagttcgaattgaccgggcagcgcactgagctgccgccgacgctggatgatcccctgcgccacaaataccacgtcgtcggcaactaccaccttaacggagtgctttgatgtcccgtgaaatccgcttgaacgccttcgacatgaactgtgtcggccaccaatcccccggcctgtgggcgcacccgcgtgaccgctcgtggcagtacaaggacctggaatactggaccgaccttgccaaaatcctcgaacgcggcaagttcgacggtctgtttatcgccgacgtgctgggcatttatgacgtgtacaacggcaacggcgacgcggcgattcgccaagcgacccaagtgccggtcaacgacccgttgtcgctgatcgcgccgatggcgctggtcaccgaacacttggggtttggcttgacggcgtcgttgtcgttcgagcatccgtacccgtttgcccgcaggctttctacgctcgaccacctgaccaaaggccgcatcggctggaacatcgtcacctcttacctggaaagcggcgccaaaaacctcggccagaaagcccagaccgaacacgacgcacggtatgactatgccgaggaatacctggaggtctgctacaagctctgggaaggcagttgggaggagggcgccgtgctgcgtgaccgcgagcgccggattttcagcgacccgagcaagatccacgaaattcgccacgtcggtaagcacttccaggtgcccggcatccacctgtgcgagccgtcaccgcaacgcacgcccgtgctctatcaggccggcgcgtccagccgcggcaagcagttcgccgccgagcaggccgaatgtgtatttgtggcggcgccgtccaaggtgctgctgaaaaaaaccgtcgccgacatccgccgtcgcgccgccgaggccgggcgtgatccgaagaaaatcctgatcttcaacttgcagacggtgatcgttggcgagaccgacgccaaggccaaagccaagttcgacgactacaaatcctacgtcagctacgaaggcgccatggccctgatctccggctggaccggcatcgatttcagccagttcaatcccgacgagccgctcaagcatgtgcacaccaatgccattcaatcggcggtggaagcgttctccacggcagacccgaacaaggtctggacgcccaacgagctggcggattgggtcggtatcggcggcttcggcccgctgttcgtcggcggcccggaaaccgtcgcggacctgctgcaggagtgggtcgaagaaaccgacgtggatggcttcaacctggcctatgcgctgacccatgaaacctttatcgacgcggtagacctgctggtgccggagttgcagaaacgtggcgtgtacaagaccgaatatgcccagggcacgttgcgcgagaagctgtttggcgagggcgcgcggttgggggcgaaccatccgggggcgagctatcgtgacctcaaggccacctctctctaactgaaatacctcggctaatgtgggagctggcttgcctgcgatagcggtgggccagttgcacatctggtaactgacacaccgccatcgcaggcaagccagctcccacatttgatcttcattgtttgatctatttcagccagcggaccaccgcacgcacaccccttcaataggagtattacccctatgagcgtgcatgaactcaaccccccgctggcgctggaatggcccgccgaaacactcgataacctgccagaggcgttggcacaactgcaccaccgggcacagatcacgccgctgcataccgctctgcgtcacaagcgcgagggccagtggtatgcgtggcgctggattgacgtgctgcgcgatgtcgaacgccttgccgatggcctgcgccagcaagacttcaacgagcaatcgcggttggcgctcagcggggcttttgaacccaacctgttgctgctggccctggcggcgcagtccatcggtgggcaggtgctgaccctggccgatgatctggaaccccacgtgctctatcaacagctatggcggatcaggcccagccattcgtatgtgcaaggccgccaagcggtggggcgccggcaagccgccaaaccggtggattttgccgagttgctgcgcctgacagactcggcgcagcatgtgcagcgctggtggcaacctcagggtgaaacgctactgtggagtgaagagggcactcactgtcggggcggcctgggggcattgcttgatcagtggctgaacagcggccatgggctggcgtttgcctccccaggctcggtgccaggtggctacattgacggggcgccttcaggcctgcgcaggttgttcaaagggctgccgggcttgcagcgcttgatctaaacgtcgcacgctggcggctacttgctggatactgcgcaggaccactggcatgacatttatctgggtaaacagtaagggcgaaacggcatgactgaaaccacccgcaacgctgatgtcttgatcatcggcggcggcctgagcggcacgatgctggccgtgcaactgctgcgcttgcctgggcagcggcaaatcctggtgatcgaaccgcgcgccgaacttggccgtggcgaggcctacagtgccgtcgaactgggccacaccctgaatggcaatgcggcgcgcatgagcgtcgacccggacaatgccgaggacctgacccaatggctcaccggctatatcggtgccggtggctggcctgagtcggacgagcagcacgtaccgatcagtgaactgttcccgccgcgcggaatattcggtttgtacgcgcagcagcgcctggcagaggccaaggcgttgtcggcatccaccgtcgagcatatccgcgccgaagtggttgacgtgcaagtggacgagacgtccaccgtgctgacgctcgataacggccagcagttgcgtggtgcgcacgcggtattggccaccggcatgttcccggccgcacgcacgccgcagaccgaatccagcgggttgaatgcagcggcggtggacccgtgggatgtcaaggccatggcccaaatcgacccgcaggcaccggtgctgatcatcggctccgggctgaccatggtggatgccgtggtgtcgcttgagcaggctggccatcgcgggccgatccggattttctcgcgccacgggctattaccccatgtgcgccgccagccaccggcctgggtggatttcctcgccgacgaccacagcctgcgcagcccccggcaattgctgcgtgaagtgcgccgccaatgccgcctcgcccaggcgcaaggcgttgattggcaagcgccgctggacaccgtgcgggcgcacatcgggcggttgtggagccaggccggtgagcgcgagaagcgccagttcgtgcgacatacaaggccctggtgggaaagccatcaccaccgctcgccgccgctgagcgcgcagctggtggcgcggctgcacggggaggggcggctgcagattctggcggcctcgttcaagggtgtggtgccgtccgatgagggcgtgaccattcgcttgcgctaccggggcgagcaggcactgacagaggtgtcaggtgcggcgctgatcaactccagcggcatcgaatacgactggcgccgcgtggcccggccattgccgcaacaactgctcaaacgcgggttgatccagcccgggccgctggcgctgggaattgcggcggaccagtcgggggccgtggtggatgcccaaggtcaggtgagccagcggttgttcgccatgggcccgccattgcgtgggctgtggtgggagagcacggctgtcacggacgtggcgttgcaagccaagtcactggccgcaaggcttacgcaaatctaaatgtgggagctggcttgcctgcgatagcatcaccacggtgtcactgatgcacctcagtgtctgcatcgcgggcaagcccggctcccacacaagcccacccacatgtggatcttcatttaccttgcggttttcacaaaaccgggcttgagcccaaacacctcaacgccctgcgccgtcgattgcccggtagtcactttcactcgctcctccggctgatccatggcggcgcgatacgccaccgtcatgtcctcacggttgatcgcctgggccgggatcacaatggcctgctcattgttgtaggtcacgatggtcaaccgtgcgctcatccccagccgcacgcgctgcacctgttgcggcgtgagcctgggaatcgacaaggtcaccggaaattgcgcgctgccctggctgtcgctggcaactgccaggccgctgaccacgctgacggagccgctcaagcgttcgccgtcaaacccgtcgcccatcacttccacgggttggccctgatgcaaactgttgatgtccagttccgacactttggcgacgattttcagccgctcgatattcgccaggccgaacagcacctggccctggctgaccttgctgcccgcttgcaccggcgcgttgccgttggcggctgtcggcgaggtgttgttgccgggtgcgggcaccacgatgccggagaagggcgccctgacctctttgccatcgagcagcttgcgcagggcgtcgtatttcacggtggcgttggtcagctccatctcggcgatctggcggtattcgcccttgccttgctccagcgcctgttgcagttcgctgcgcgccgccgccaggtccaattgctgctgctgggcctgttgcttgaggtcatcaagttcgttgcgcgggatgatgccgcgtttgaacaggttttcgctttcggtgagtttgcgctgggtgttgccggcggtcatttccgtggtgcgcaggctgcggcgcgcacggctgacggtggggccgttgtcccagtcctgcatttcctgcacggcgcggcgggccttgagttgggcggacagggcatcacgcagctgtatttccagggtggccgggtccatgcgcagcaatagctggccggcgtcgacccgctggccttgctccacaaggttggccaacacattgccgtcaaacggtgcggtgaggatgagggtggcgtcgggttcgatcttgcccaccaggccgatctgatgcaccagcgcgtcgggctttattgccagccattgctcggcagccggtgcctggccggtggcggggctgcgcaaggcaacgcctgcacccgccagcagcaccagcagtgcagcgcccaacaggtattttttatcagtagtcattgagggctatttcccaactttccagcgtcatgcccagggtcaagtcgagctgggtctgggcgttcaaataagcgatcagtgcattgagttgcgcgttctcagcgttgcgcaggtcagtctcgaaactcagcacctggaagttggtggagcgcccggcgctgagtttttcccgctcgatctcgatcttgcgccgcgacaattcgacggcgcgctgggagatttcatactggcgccagcgcgtaccgaggtcacgtaccacgtcgttgacgttgcgttccagctcctggcgcgcgtcggcgatgcgcacttcctgatcttccacattcacccgtgcacggacttcggcctggcgggtgctgatgtcaccgatggggatctgcacctgcaccccggcgtagctgttccaggtgcggttattgttgttgccgttgtcgttgttgctgtaggcatcgcggatctggttggcaccggccaccaggtcgacttgccagcgtccggagtctttagcgatgaccaggttgaggtcagcctgctggctgcccagcagcgcggcgaggtattccggttgctgggtttgggcgaggttgaaggcctggcgcttgtcgatgctcatcggcttggcctccagcgcctcgctggcacggatcggcgtcgacaggtccagggccagcaggcgcagcagggccaggcggctggtgtccagctggttctgggcttcttccacgcccagttgctgggtggccatatcggcttcggtctgcacgatttcgaactcggccatgcggcccgaggcgatcagtgccttgttcacctccagcaacgtccccgagcgcttgagggcgtcctgcacgatgctcagttgctcctgggcacgcagcagctcgcggtaagtggcgatgatctggctgatggtctgtgccacggtggccttgaggttcaggcggttggcctgctccgacaggcgtgacaggcgcagcggcgcagtagtggcgtcccagccggcgccgcgcatcagcggctggatcaacgccaggtccaggccatcgctgcggtagcggccggcgcggtcggcgttgttcagttgctgggtccaggccatgctcagccgggtgccgtattcgccgagcaaggtggcgttgggcgccaggttggcattgcgcgagttatccgccgagccacggctgttgcggtaataactgttgagggtgagcttggggttgaaggtgtcttcggccacccgcaggtcgaatttctgtgccacccgctgcaagtacgcgctgcggatcgccgggttgttgcgcaagcccaggtacaccgcgtcgcccagggtcaaggtggtgacttgggcgttcagcgacacgctgcgctcgtaaccgctgcgcgtggtgctgggcgccgacgggttgatgacgacatcggcagcggctgccggcaggctgatcagcgcgagcaacaaaagccccttattcatcgcgcaaggcctccaccggctgcaggcgcgaggccgaaacggccgggtagatgccgaaaaacaaccccaccagcaacgtactgcccacccccaacggcagggcggcggcggccaaggcaaactcccagcctgacagccaggcgtagagccaggctgccgtcatgcccagcaccgcgccacacagcgcgccgacagcggtgagggtcacggcttcgagcaaaaacagattgcggatatcccgctggcgcgcacccaacgccatgcgaatgccgatttcacggcggcgctccgacacgttcatcaacatcacgttcatcacaccgactccgccgcccaccagagaaatcgcgcccagggccagcaatagataagcgaacgtgcggctttgccgggtcatgccatcaatcatttgctggggcacctggatgttcacatcgtggtcggtgagctggcttttcagtgcctcgccggcgtcgtgggccaaatgctccatgttctcaccgggtgccgcgcggatgatcacgttgctgatttgcggggtggggtagatgcggcgcatgccttcagcggggaggtacaacgactcattggcttgcaccggcatcaacagggcgcggggctggttctgcaagatgcccacgatcaagaacaggtagtcgttgatgcgcacacggtcgcccagtgccaggggcaccccgggcgagccaagggcctgggcgatctggtcaccgatcacggcataggtttcgttggcgtcgaagggcgacaaaaaccggccttcacgcacggctaaacgcatggcgtccttgatccccggcgtgctgccgacaaaagtggcgctgacggtctggccattgaacacaatggggccgctgaactgggtcagcgcaccgatatgggcaatgccgggcaccgcccggcgcacggcctcaaggtcgaggctggcgcgcatcggcgcggtactgctgcccttgggcgggaactgggcgaccagggtgtcggtgcccatgtccttgaaaatcagcgcggcatcgaccgccgcgttgtggccgatattgatcaaggccaccaccgacgagctgccgatcacgatccccagcagcgccagcaccgaacgtttgcccagggtgcgcaggctgacgaaggcttcatgcagcagttggctcaggctctgttcaacccgacggctcatgggcgcccggcctcatgcaccacgccattgcgcaccagaatcttgcgctgcaggcgctcggcgatgtgcgggtcgtgggtgacgatgatcagcgtgacctgttgttcgcggttcagtgccagcagcaggtccatgatttcctgagcggtggtgctgtcgaggttgccggtgggttcgtcggcgagaatcaccgacgggttgccgaccagggcgcgggcaatcgccacgcgctggcgctggccgccggagaggtcggcggggcggtggtgggcacgctcggccaagccgacttgttcgagcatgcgttgcgcctgttccaccgattcatggcgcgacacaccgcgataactcaggggcaatgcaacattttccagggcgctcaggcgtggcagcaggttgaaactctggaacacgaaaccgatctggcggttgcgaattgcggccagttcatcggggcttgcgttgaaaatatcgtgcccggcgaagtggtactggccgcagttgggcaagtccagcaggccgagaatattgagcagggtgctcttgccggagccggaagcaccgaggatgccgcagctgtcaccgctggcgatggtcaggcacacatcattgagaatggacaggtgctggccggccaactgatagcttttgccgatgccttgcagggagatcaaacctgggtgcgtgggggtctgtgtcatcatgactacgcctgcagtctcgacggtgccgtcatgcccccggtaaagctttgtaacaagttcgggagctgcctggtacgcatcacggactggttttatttcttgtttttaaaatattgtttgaatagtacccgcgttcactgcgcttcgccagccgtggatgtagagcggttttaccctttgaaacgaatttccaagcatgcgctccaggcgcttgaaaaagccttcggctagcctccgcatgcccggttatacgggcttttgatgatatggcgcagtgtcactacttgctttcaacaggccgccccggtataaaaaatcaaattattttttaaaacaatatttcccccgtggaactctttatggtcgcgaagaaactcagcgctccaaacgttaccaagactcgactgctggatgcgacagaggctctcttcatcaaatacggctacgacgccgtgctgctgcggcagattaccgagcgggcccaggtgaacctggccgccgtgaactatcacttcggggacaaggattccctgatgaaaaccctgctgatgcaacgcctggagccgctcaacgagcagcgcctggaactgctggcacgctgcgaagccgaatccgacgggcccctcgattgcgacaccttgctcggcgtgctgttcgccccggccatgggcctggagcgcagcgacccggcgagcggcgaagggcgttcgttcatccgtttcctcggccgtgtttacagcgacacctcaccgtttatccaggaatacctcaaggtgcattaccagccggtgtttcaacggttcttcgaggcgtttgccctggccttgccggacctgccgcgcaatgaactgggggtgcgcctgcaatttgccctcaaggccatttccggggtcatggccggcaccgaactgcgcctgctgatgaactccatgagcctgggccgcccggcgacagatgccgaagtgatggccaagctgatcaccctggtatcggcggccattcgcgtgccgcagcaaagcccggaagccgaaacggcgctggccaaagtgctggatacccagcgtgccattcgcgaacacgccgcctcacctgccgccaaagcctcgcgctgaacccaaatcccaggcaaaaaaaagcccgctggggcggcgggcttgatgtgcaacgtttgtaacggatgaggcttcaccctacggctgtggatgtgaataaatcgtgaaaaatatgtaagaaaaaggcgcagcagaaaaagtttcaaggccacttcggcgcccgccggtttgttccagggcgttcacgccaatgctccgcgcgctcactcagccgggtgaggcctgcgttcaaatcttccagtgactcgatgatttggctaatcgctggcgcatcccgtcgacattccccgccagttgcaacgtcaacaaccgatacccatccagtgcactgtgcaccggcgcatccagcgcaacgtcatccgctgcgtgcgcggcgggccgctccagccgctccgtaactccggacttcaacgcccgcgccatgcccaccagttgcacgcgaatctgccgattttcggccttcaacagcacctgcatccgcgccatcgcttgctcatcccgaggatccgggcgggtgttgccgagaatctccagggtgctgatgcacatcctcaaatgccgctggatcgcgtccaactcggtcatggaaatgcgcacttccttggacaccgacggcatcaacgaacgcagttgcaacatggccgcgttcaggcggttgagcagtttgaggtgttcatcatcggtgaccgactggccgctgatgatgcggctgtagatcgcggcgcagtcacgcaatgcactggccaggttgtagcgccaggaataaacggcgtacagcggcaaggcgaacgagaaggccagggccagcacgatgccgatcaggatgtcgaccgtgcgccacagcccgtccgacaacgggttgtcgccgtgcccggcgacgataaacacggtgatcgccgacagcagcgcgatgtagccgcccttgccgatggcgtggtacgagaagaacccgcacacgatggacatcagcaaataagtgaccagcggctggccgaggtacgcctgttgcgccacgatcgccagccccacgctggcgccgatcagggtgccgtaggcgcgttccacggcttttttgccgatattgccgtggtgttgcaagccgccgatcacgatcagcatggtcaccgaggcccactcaccgtggggcaggttgatgccggtggtgagcaggatggtggcgagcaggccgatggacacgcgcacggcgtggatcagcttggcgtggcggtagcggcggtaggggtcgagcaaagggcgcagcaggcgccgggcgaagaggggtagattcatcgtggttaaggtggcctcggtagtcaggggcggactcggtcaaatgtgggagctgggtttgtgtgggagctggcttgcctgcgatggcatcactgcgatctgcctgaaagactgaggtgaaacgatcgcaggcaagccagctcccacaaaagccagctccacacggtggactgcgccgttcttagaagatgtagtcggttgtcaggaagctcgagtcacggttacgcaggatgtcgctgaccagcgccttgttgctctcctggaacttggtggccaccagggtgcggatcgagaacacgcgcagcgcgtcatgcactgacagcgtgccctcggccgagtttttgcggccgttgaacgggaacgtgtccgggccgcgctggcactgggcgttgatattgatgcggccgacctggttggcgaaggtgtccaccagccggccgacttccacggcgttggtgccgaagaggctcaactgctggccgaagtctgaatccagcacgtactcgatcacggtttccaggtcgcggtacggcacgatcggcaccaccgggccgaattgctcttcgtggtacacgcgcatctgcgggttcaccgggtacagcacggccgggtaaaagaacgatccacgactttcagcgccatgctcattcaccacgcgggcgccgtgttgtgcggcatcggccaccaagccgttgaggtaatcgaccttgccgacttccggcagtggcgtcagcgccacaccgtcttcccatggcatgccgggcttgagcgtggtcagtttcttgttgaatttctcgataaagcttgcgaccacatcctcatgaacaaacaggattttcaacgcggtgcaacgctggccgttgaacgacagcgagccggtgacggcctcgttcacggcattgtccaggtccacttcgggcagcacgatgccggggttttttgcgtccaggcccagagcggcgcgcaagcggtgaggtttggggtgcagctttttcaagtcgctggcggctttgttggtgccgataaacgcgaagatgtcgatcttgccgctggccatcagcgcgctgacggtctcacggccgctgccgtagatcacgttgatcacgccggccgggaagctgtcacggaacgcttccagcagcgggcgaatcaacagcacgccgagcttggccggtttgaacacgacggtgttgcccatgatcagcgccgggatcagcgtggtgaaggtttcgttcagcgggtagttgtaggggcccatgcacagtgcgacgcccagcggcacgcggcggatttgcccgagggtgtcctgttccagttcgaagcggctggagcgacggtcaagctccttgagggcattgatggtgtcggtgatgtagtcgcaggtgcgatcgaattctttctgcgagtctttgagatttttgccaatctcccacatcagcaacttgaccaccgcgtcgcgttgttcacgcatgcgccgcaaaaatgcctccacatgctggatgcggtcggccacgcgcatggtcggccattcaccctggccacggtcgtaggcgcgcacggcagcatcgagggcggtgagggcggtttcggcgtccagcagcggtgtactgccgatatgcacgcgctcgtcgccaaactgcaccgggctttgcacttttgccaatgggccgttccatacctgcaactggccgtcgaccaggtaatcacgctgttcaatcggcgcccccaactggaagggcgcgggaacctcggcggcggaggcgggaaacaactgggcgagcaggttactggtggtcatgtcactacccctggaatagttgcaaaacatgactagagagtcacccaacaacaggctctatggcaaggcttgcgcgctttcttgtacgcctgcgggtaaactgcgcggcttttcagaaggagttcacatgagtcactaccagccgggcattcttgccgccccggtgccgttgcaggcacgccatctgttttttgccgtggataccctggccgctgtacctgccgcgttggacgcgctggtgcaattgacagattcggccgcagtggtcggttttggtgcgccgctggtcagtgccctgggggctcaggtggcagggctgcgcacgtttcccaccgtcagcgggccgggcgcgcataacccgtcgacccagcaggcgttgtgggtgtggttgcacggggtggatcgcggtgagttgctgttgcgcagccgcgcgtttgaaaaggctctggcgccggcgttccgcctggtgcagatgaccgaaggcttccgctacaagaccggtttcgacctcaccgactatgaagacggcaccgaaaacccccacgacgatgccgccgtgcaagccgcgctgaccgacagcggtgccagctttgccgcgatccagcaatggcagcacgatctcgacggctttgccgcactccccgcgcaagagcgtgaccacatcatcggtcgccgccatggcgacaacgaagagctggacgatgctcccgagtccgcccacaccaaacgcaccgcccaggaaagcttcaccccggaggcgttcgtggtacgccggtccatgccctgggccgagaacggtcaggcggggttgatgttccttgcgtttggccattcgttcgatgcgtttgaagcacagctgcggcgcatgagtgggctggaagacgggattgtcgatggcctgtatcgcatcagcacaccgttgaccggtggttactactggtgcccgccggtcaaggatgggcatttggacctgagtgcgctcgacgttacaccgcaaatctagaatgtgggagcgagcaagcccgctcccacatttgatctttgttggctgataaaaagtgcttcagatcaccccacacaccaaccgctcacccccgccccccaaaggtttaggcatgtcggaatggttgtcgccaccggagtggatcatcagcgcgcggcctttgatctggtcgatggttttcaggcgtggcgccaacaccgggttggtggaggtgccatccatgctcacgtacagcgcgggcaaatcgccgaggtggccgtcggcgtaagggcccaggtgcttgccggttttctgcgggtcgaagtggccgccggcggcaagggccgcgactttcacaccgtctttcacaccggcctcacagctgccgttttcatggatatgaaaaccgtgcacgccggctggcagggatttgaggtcaggggtgaagatcaggccgtaggccgactcgctgatggtcacgctgcccacgggctgcggcgcgccatcggcactcaccaggttgaccgggacttgcagtgaagcggcttgtgcggtgccgactgcaagaagactgagcaggccgagcataatggagcgattcataaaaggagttcctgatagttataggtgttgggcagtgtcaggaactacaacgattgggccgcgccgataattccgttggaaaaaacatatttttccaacggaataaccttcacggatcagctgttttgcatatcgatccgcacgggctgcataggcgcaaaaaacggcatcaccgccgcgctccggcaatggcggcagccgtacacgcccagcaccacgggttctttcacttcaggcaccggcgcctgttcgaaccaggtcggcgcgacaaaccggtagccctggcccgccgctgtggcgatataggacgattcatcatcgcccagggctcggcgcagggtcttgatctgcgtgcgcaggttgcattcttccaccaccagcctgggccaggcgacgtcgagcaattcggctttggccagcaattcgccgggccgcgaggcgagggcgatgagtaacgtcagggcacgattgcccagggccacgggttgcccgtgtttaagcagcaaatgacgtttgggcagcagtttgaacgggccgaagtggatctcaaaggaagcgtcatcggtaaggtggctgcgagtcgagtacgtcatgtcattaaacctttatgcgttggaaaacagcctggcgcggctccctttcatgccgggctgcagaagggtgtcgagaggttactcatcgaaatttgatgctttcctatatagagcgtctgatgaactaacggttttggctattagtgcaactgtactaatcgggccttccgcgttagttgccagcgagtaataaggccgcttgcgccgagctatgaaacgcgatgattaagtcgcttttgttacaaatagaaatatcttgaaagttgggcaaagggctattagcgaaaaatgtgaagtcgacacgaaaaaacctgtgaaggcctgccgaaaaggtcactcaaccccgggcctgttgctcgatgatgcgcgtcatgcggcaagaaggggcccgtaaacattggtgtttactgtgttttggtttttttcaaaaagttcaacacgctcagggggatgagattttttcaacgccaggttgagccaaacctttcacaccctgtatctgaaacgtttcacaagctttcacagcgaaggcgttttgatcgtgagtagtatggaacccatgcaaaccaacgacggttcgaaagctcactgtctgacgttttgggcattcaccggtttgcatactttcagcttgctgttgcgcaactgaataacttccctatcgatgcaaggagatgaacatggctgatgtcccaccagtaaaagcaggcggcgccgacgacgctatcgcgaagatggaagcgaccttcaacatggctatcgagaagtcggccaagatcaccgaaatcagcaccgcgaaaaaagctgagctcgacgctaccaaacagcgtccgcagaactgatttgccaaacgggcggcgccggcgctgcccgtttacccatcgcttgtggcttgaaaaaacaccgtttgaaaaatgttgcaccgttgttgatccacgcaggcgtgcatgcggcctgtgattctcaagggggcaaacccgaacatgacagccttgatttccttgggtccggtcgccggtatcggcgcaccgaccctcactgtgaccggcggtttgcaccagggcagttccctggtgctcgaccagcctgtctacaccatcggcgcggacctcgcggccgatctggtactcagcgatcccggcattgccggcctgcacctgcgcctgcggttttttgaaggcgctcaggtggcggtcgaggcgttgggcggtgacgtgctgctcggcgccaatgtgcgcattccccaaggcagcgggcatcgcgcgcggctgccgttgcaactgcgcatcggcacggcaggcgtgagcctggcgctgcctgaaggggcagaaaaacccgctggtgcaccgcgcaaattgacgccgtggatcgtggcgggcgccttgttgtttctctgtgcgggcgcgctggcgtttcgcggtgaggcgccgttggcgtcggccgcaagcgtggttgaggtgcctgcggttaaaaaaccttcccgcgagcaagccagggcctggtttgaacagcagcttcaggcggcgcacctggatgacatcaaggtcagcaacctgaatggccagctcagcgccaccgggaccttcgagcattcgcaaaaaccgcagtgggtggcgttgcagcaggccttcgaccagcgttacgggcaacaaatcgtgcttaacccgaaagtggcggtgcgcgctgatgcggcacggccgcgcgtgcgttttcaggccgtctggtttggcaccaacccttatgtgatcaacgacagcggcaagcgcctgtaccccggcgcggcgctggcggacaactgggtgctggagcgcatcgagaataaccaagtgattctcgccaggggcgaggagcgctttaccttcacgttatgaccacgcttttttagctaaggccctgggatgaaagtcgaaccccgcccgttaattcccagtgatgtgcgcagcgcaccggtcgaagccattcgcccggtcaactcgcgccaggcgaccgccttcgaagcggtcctgaaaacccgcaagacccagacccgccgctcgctgcgcagtgacctggaagaactcaccagcgcggccggcgtcgactcgctgctgtttggcagcgcgcgttcgcttgagctgctggaacacgtgatggagcacattctgccgacgctggacgccgaacctgaaatcaaggaactggcccacgacctgatcagcgaagagatagaagtacgccgcaacctcgaacagcaacgctcggaggtacatgcctgatggcccgcgataacgacgacgccgtgcaactgctcaaaggcattggcgagctgtaccggcgcaatggccagtcccagcgcgccctggtgatgttgttgatcgccgtcagcgtcgcccctcacgacggcgtgctgttgcgctcgctggtgctggccttcaccgacagcggcgacgccacccgcgccctcggtgcgctggaccgcctggtggcgctggaaggcgagtctgccagcttgttgctgttgcgcgcccgtgccctgtggtacggcgagcgcaaggacgaagcgcgccagtgcttcaagcgctacctggccgcacgcagggccggcgcatgagtgcaatgaaccgcttgaacaacctcgcgcgcatggccgcgcaacgtaccgacgtgatcatcgtcgcgttcatgctgatggcgattgtgatgatgatcatcccgctgcccacctacctggtggatgcgctgatcggcctcaacattgcgctgagtatcctgatcctgatcgttgcgttctacatcggccactcggtggagttctccgcgctgccgccgctgatcctgctcagcacgctgtttcgcttgtccctgtcgatcaccaccacgcgtttgatcctgctgcacggcgacgccggccatatcgtcaaggccttcggcgacttcgtgatcgccggccaagtggtggtgggcatggtggtgttcctgatcatcaccgtggcgcagttcgtggtgatcaccaaaggcgccgagcgcgtggcggaagtggcggcgcgtttcactctggacgccatgcctggcaaacaaatgagcatcgacaacgatttgcgcaacggcgatatcgaccaggctgaagcccgccgccgccgctcgcgcctggagcgtgaaagccagatgttcggcgcgatggacggcgccatgaagtttgtgaaaggtgacgccatcgccggcctggtgattctggcggtcaacctgctgggcggcatgctgatcggcatgatcgagcgtgacatgccgttcggcgtggcggtgcacacctactcactgctgaccgtgggtgacggcctgatcgcacagattcccgcgctgctgatctcggtcgcggcgggtaccgtggtcacccgcgtcaacagcgacggcgaggccggcgacctgggcagtgagattatcaagcaattgggcgccagctaccgcgcgctcggtttgaccgcgctgatcatgatcggcgtgagcctgctgccgggtttcccgacctgggtgttcctcggcttgtccgcgatctttggcggcgccgcgtttgtgatgtaccgccgccacacccgtcagccccagggcgagatggaggtgctggccgaggtgccggagccggtggtggaagtccaggccgaactggatgacaacctgctgcccgatacccgcgtgctgctgaccatcggcaatggcctgtcccagagcgcgccgcgccagttgctgcgccagcgtatcgaagccttgtgtcacgacatccgcaccgaactgggcgtggacgtgccggtgccgggcatctacatggaacccaaggcgccgccgggcggctttcgtgtgtccctggaaggtgtgccggtgagcgagggcgaaatgccggtcaactgcctgttgctgcaggatgacccggtgcacgtacagctgctcgacatcgcgacccttcaggccgactcgccgctcaatggccgcaacgcccactggatcgaacgccagcacgaagagaccttgcgcaacgccggcattggtttcctgctgcccgatgaagtgctgcgcggcgtgctggaacgcagcctgcgccgttatgccgccgacttcctcggcatccaggaaacccgcttgctgctggaacgtaccgaagccacctatggcgaactggtcaaggaagccctgcgcctagtgccgttgcagcgcgtcgccgagaccctgcgactgttggtcggtgaaggcgtgtcgatccgcaaccagcgcgccttgctcgaagccatggtggagtggggcgcccgcgagaccgatgccgggcgcttggccgaacacttgcgcgcggccttggcgcgccagatcagccatcaatacgccgaccgcaaccgggtgatcggcgcgctggtcttggcaccgggtctggaagaccagctgcgcgcctcgctgcgtcgccaggagccccagcgtgaattgatcccggaagacgtcagccgcgccttgctcgctcaactgcgtcaggcctgcgagaacacccgtgaagtcaacagcgccgtgttgctggtgcaccccgaactgcgccgcagcctgcgccgtctggtgctgcgcggtgagctggagctggcggtgctgtcgttccgcgagctggccaccgagtacaacctgcaagcgctggtgaccatcagcctcaccgacatctccaaccgccgcgcgcctgccgcggcttccgtcacccccctggcgtctgcctcatgatgcgtttttgtgtgctgttgctcagtgtgttttcgtgtgtgtgccaggctcaggaaattgctgccggtgctggtggctcgattaatctggcgtccggggaagggcgcattctgcactttgttgcgccggtggaatcggtgttggtggccgaaccgaatgtggccgacctgcaagtggtgtctccgggcacgctgtatatttttggcaaggcaccaggcactaccagcctgatcgcgctcggcgaaaacggtaagcaactggcgagcctgaccttgtccgtcagcagcggtacccagggggtcaccgcgccgatgcaggaattgcacccgggcaaccgcgcgcagatcaccggcgccggtaaccggctgatcgccaaaggcaccgtgggttcggtggctgaagcaacggacctcaatgcgctgctcaacccccagggccaaggctttcaaagcgcgatcaacaccactgaatacacaggctcggcccaggtgaacctgcgtgtgcgctttgccgaagtgtcccgttccgaactgctgcattacggcgtgaactggaacgcgatgttcaacaacggcacgttttccttcggcctgatcaccggcggcggtttggcggcagcgactgccggtggcctggccacggcgggcaccggctcgggcaacgtgaacatcgacggcatgctcgatgcgctgcaagccaacggcgtgctgcagatcctcgccgaaccgaatatcaccgccatgaccggccagactgccagcttcctcgccggtggcgaagtggcgattccggtgccggtcaaccgtgacctggtaggtatcgaatacaagtcgtttggtgtgtcgctgctcttcaaccccaccctgctgcccaacggccggatcgccctgcaagtgcgcccggaagtcagcagtgtggtcagcggcggcaccgtggatttcggcaacttccatgtgccgtcctttagcgtgcgccgcgcggatacccgggtggaagtcggcagcgggcagacgtttgccatcgcgggtttgttccagcgtgagagcagccaggacatcgaaaagctgccgttgctgggcgacttgccgatcctgggcaacctgttccgctccaagcgtttccagcgcaatgaaacggaattggtgattttgatcacgccgtatctggtggagccggtgcgcggtcgcaccctcgccacgcccctggacgcgccagcggttaccgcagccgccaccgggccacgcagcggtggggcgttcggtttttacatgaattgatgagggggcttgcgatgactgttttacgtgtgttgatgctgctccccctggcgctgatgggctgccagactcacctggcgccggtgtattactcgccggagtaccgcgtcgatgggttgcccacccagtgtcagcagccgcctgcgatcgacacgattgggttggatgaggatttcaaaccgacgttgccgctgggctgtgcgaacaatctgaatttgatgcagatggtcgagcgtaagcaggacctgacccagggccgtgccaccggacctgccatggccgcgccagtaggccgcgccgcgcaggtgtatatcgaggggtttgatcgggagcagttgcagcggcgtaaggatcagcaagaggccaaggctggcgctaccggaggtcagcaatgaccgggcgtacactgatttcctgtgggagctggcttgcctgcgatggcgccctcccagccaacccatacctccctgacactccccaatccaaatgtgggagcggtggtgcgacgattcgacttgctcgcgaaagctatgtgtcaggcgctggggtttttggggcggagtacatatccattgctgcggtaacggccacctatggttccgctcttacagcgggtcacttttggaaggacccaaaagtaaccaaaaggtcctcgccccaccactcggtgcctcgcctaggctcggcatgccctcactacggcttgaatccgtgggccgccgccatgggccatccctggcccatcgcggctaacccggcgtcctgccgggttacccacggattcaagcctgcgtgcggccagcgtggttttacggagcgcttgagatcaaaagcagatcaaaagccgttccgtgttgtatcaacgcgggtcaaccaaccccagttccttggcttgcgccaccggatcgctgatcgccttgatgcgtttcgcttccgtcaccaggcgctcgcgctcggcggcggggatgtcgtccagcggcaagccggcaacgcgttgctcgtagccggccaacaccatcaccagcagttcattacgctgatgccttggcagtgcgcgcggcgattgggtgacgggggcgatggtgtccagcgcctgttgcgactgcccgccgagggcgtaggccagggccaggttgcagcggttgtcgaggtcgtcgggtttgaggctcaggctcttggcgaaggcggtttgcgcggcaccggcctggccgttgaggatttgcgcgacgcccaggcgggtgtaggcgaccggcaggtggttgatctctgcggcctggcccagagcagtgacggcgcgttgggtcttgcccagttgcagttgcgcagtgccaaggccgagcagggcgtcggcgttgcgtgcgtcaaaccccagggcttgctggaaggcgcgttcggcgccgagtgcgtccttggcgtcgagcttggcctggccgagtttgagccacaggtcgaggttggcccccggttgttgggtcgcgcgttcgtacagcgccgccgcgctggcgtagtcgccgcgtttgctcaggtcgcccgccagttgcagggacttgtcggaatcggtcgcaggtttgctggagcaggcggcgagaagcagggtactggcaagcagaaaattcttggacatcgtcacaactcgtctggcaaaggcgcaggccatgtaagcatatttttgacggcactcctatgcctcttcagcgccagtttcgccagcgccgccgaagagcccgcgtggttctccaaaccctacgcctacgtgctggtggaccaggatatgcgcagcgccctggaagagttcggccacaacctcgaggtgcccctggtgctctcggacaaggtgcgcggcaaggcccgcagcacgattcgcgcggccaccgccggtgagtttctgcaaaccctgtgcagcaccaacggcctgacctggtacttcgacggcaaccttctgtacctcaacaccagcgacgaaatcaccaccaagttgttcaaggccagcgccctgaacctggaccagttgcaggcctatttgaacaacctcgatgtgttcggccagcagttgtccatgcgcaatggccccgagggcgatgaagtattcgtgtccggaccaccgccgtacctggcgttggtgcaacagcacgtcgatcacctgcaacccgttcgtgtggccgccccggtggcgcgcggccagggtgtgcgggtgttccgcggcgcgcaagtcagcactgaaaccccaaaccagtaaaggagcagcaccatgtccgtaacggccgtagacagcaatctcgcccctggtggcgccagccctgaagccaagttcaatgccgcggtggataacgccaaggccgccgacaaaccggcggatacctcggacgcagacgacgccaagttcaacgatgcgttgatcacccaggccgtcaccatcggtggccagttcatcatcatgccaaagatgcaggaactgctgaacgatgccatgtccgatgacgacgacgagtaggaacctcttatgactatcagtctcgccgccggcgcttcggccttgccgccgtccgctggcgcggggcccgccggggcctcgcagaatctgttcgagcacatggccaataccgccaagggcatgcccgaaggcgcgagcccgcaccagatcggctcgggcttgatggaacgcatgaacagttttatcgaccgcacgcgcgcgttttccgagcgtgccgatgtgctcaccaataacccgtcggcgccgccaccggcctcggcggaaatccgcacggccagtgcttcacctcaaggcgagccggggaaaaaagtcggcgagcagcaggtcgaccagatcgtccattccctgggcaagatgttcgactactccatcgaaacccagatggtggtgcgcggtgcgacgcagatttccggttccgccaacacgctgctcaagggtcaataacgccatgccaagcccaaaccgcgccttgcgcctgttgctgatcggcctgctcgccagcctgttgcaagcgtgcaacaccgacctctataccaacctcagcgagcgcgacgccaacgccatggtcgcggtgctgctgcgcggtggcattccggcagagcgcaagacccaggacaacggccagctcaaggtggtggtcgacgaagaacgcttcgccgaagccatgaccttgctcgacaacgccggcctgccgcagcagagcttttccaacatgggcgaggtgttcaagggcaatggcttggtgtcgtcgccggtgcaggaacgggcgcagatgatttatgcgctgagcgaagagctgtcgcactcggtgtcgcagatcgacggcatcgtggccgcccgcgtgcacgtggtgctgccggataacgacttgctcaagcgcgtgatttcaccgtcctcggcctcggtgctggtgcgctacgacccgggcaccgacatcaacacattgatccctcagatcaagacgctggtggccaatggcatttccggcctgagctacgacggtgtttccgtcacggcgatcaaggcggctgtcgccatcagccagaaccccgcgcaaccgcgcctggcgcgttttatgggcctgtggatgcttgaagacaacgtgccccaggcgcgtttcatgttcggcagtttgctgctgatcgctctcggcgccctcggtgtgttggctcgccagcattgggcgcggcgtcagtcacaggccctgtatgtactcaaggagggtgaatgagcttgtttgaacgctggcaagggctgatcgccgagccattgcagtttgtgcgtgggccgagcctgggcgcctgttttgccgatgacctgccggatgaagtgctgcacgccatgcaggcccagccgcgttttcgccagcgcctggagcagttgctggtcagccattaccaactggcgccgctggagcaactggtctcgccgttggccgctgacttgccggtgctgttgttgtcggacgcgcaatttgcccgcctgccaaggttgtgcggggccatctggcatgcctcgaccttgagccgcgagattcgccgcgaggtggtcaacgagctgcgctccggccttggcgccgacgtgttcagccaggccctggctcttcggcaactgggcggcgcggcagatttgctgcgtgaccccgccgagctgatcgaagcgattgaccgcgacggccagggctgtgtcgccgcctggctgcacgcccagcacgccgatttccaaggctggttgcgcttgcgtttcgcgttcccccagggccacagcgcccggctgccgcgcgacctggaagttgttcaggccgccgccgcgtgccttgccgccgaggacattgccccatgagtgaattaccgagccgtccgacggcgcgcatcctgcgtgccgaagaagccgcactctggactgacgggtttgcctttctgcaagccgccaaagcgcaggccgagcaggtcaaggccgacagcgaccagtggctggatgccgcccgtgccgaagggtttgaaagcgcacggcaagagggcgccgagcaggtcgcgcagttgctggtgcaaacccagtcccaggtgcagcactacctgagcggcctggaaaccgcattggctgatttggccttgggcatcgtgcgtgaagtgttgggtgagctggacaatgccgaccgcgtggtgcgctgcacgcgccaggcgctcagcgcatttcgccaggatcaggcactgacgctgtgggtggcgcctgccgaggtggatgccttgcgccagcgcctcaaaggtgaagggctggcgattgccgtggacggcgatgagcagttgagcgccggtcaggcacggctgagcagtgctgccggctccgtcgaactgggcctggaagcgcaattgcaaaccctgcgtcgcagcctgttgcccttcgccgaagagggcgtgacatgaacctggagcagttgctgccgcgcttgaatgagcgcctggcccaggcgcgactgcggccgatgcacggcacggtattaagcattcgcggcgtattgctgcgcgccagtgtggctggggcgagcattggtgaactgtgccagctgcgtgacccgggcagcagtcgcagcctcagtgccgaggtgatcgggtttgatggcgacgaagcaatcctgtcgcccatcggctccatggaaggcctgtccacccgcacgcaaatcaccgccaccggcgagacgctgggcgtggcggtcggtgatgcgcagctcgggcgggtgatcagccccatgggcgaatttctggatggcgacggcatcccgccgaccgtggccttgcagcactacccgttgcacgccgaaccccccgcgcccttttcacggcagttgatcgtgcgttcgatggcgctgggcatccgctccatcgacggcctgctgaccctggcccaaggccaacgcatgggcatctttggtgagcccggtgtgggcaaatcctcgttgctggccagcatcatccgcaacagcgaagccgatgtgatcgtgatcggcctgatcggtgagcggggcagggaggtgcgagagctgctcgacgtgcaactcgacgcccaggcccgcgcccgcactgtggcggtggtggccacttcggatcgcccggcggccgaacgggtgcgcgcggcgtttgtcgccaccaccctcgccgaataccaccgtgatcagggccgcaatgtgctgctgctgatggacagcctgacccgtttcgcccgcgcccagcgtgagatcggcctggccgtgggcgagccgcctacccggcgcggttacccgccttccttcttttcggcgttaccgcggctgctggaacgtgcaggccctggccccaccggcagcattacggcgctgtacaccgtgctgaccgaaggcgatgcggccagtgacccggtggctgaagaggcgcgttcgatcctcgacgggcatatcgccctcagcgccgagctggcccagcgcaactacttcccggccgtcgatgtgctgcgcagccgcagccgtttgatggagcaggtcgccggtgaagaacacaaacgcctggcaatgcgcatccgtgagctgatggcgcgctatggcgagatcgaaatgctgatccgcgtgggtgagtactcggccggcagcgacccgctggctgacgaagccatcactcggcactccgccatcgaagcctttttgcggcagaacgccggtgaaccgagcagcctggaacaaaccctgatccgcatgcgccaggtgttggcatgagatcgcaggaatgtaccccgaccccctgtgggagctggcttgcctgcgatggcggtacaccagcaacacaagggctggctgacccactgccatcgcaggcaagccagctcccgccgttgatttccatggatttacagattgttgtgctggcatgacgaaggagcaaaagtaatgaaaaccaatgaactgcgcaccctgcaaaccctgcgggtattgcgtgagcagcgcgccgccagccaactggctgcccagcagcaacgctgcgagcaaacccatggcgtgctgaccgacgccaaggagcaactgcgcctgcaccgtgaagccattgccgaggaagcgcggcaggtctatgcctccctcaccgaaggtttgtcggtcgccagttggcaggcagcccaggaccgcttgcgtggactgtcggatgaccagcagcaactggaaaatgacgtgacccatgtctccatcaccttgcaaagccaggagcgtgagcgtgacctgtttcgccaggagcgcctgagccgccagcgccagtccgacgcctggcaaagcctgctggaaggccgcgaaagcgatgagcgccgcgttggggagctgcgcgacgaaggcgtcggcacatgatcgcagcccttgccgaccctctgtcgccgtggctgacccattacgacccggcgttgcttgcgctgcataaccaattgcaccgccgtcgccgtgcgtggcaaggccgttgtgccgggcaggacctgcgcgtgagttgggctgccgagccgcaggccctcagcgcgccgcgcgatgtgctgctgttgctcggccgcgctccggtgcgcctgcgtttgtcggcggctgcccttgaacaggtgatggtgccgttggcgttgcagtttgacgtgcagcagctgccgtcattgccgcgctcgctgttgctggaactggcggtgctcgacctgatcgagtccctggagccgctgctgggccaccctgtgcaattgcttgaagccactgaaggcctggagcagcggccgtttgccgtgcacctggccctggaattgagcttcggcaacgggccggccatgagcgcgcaactggacctgagtgaaggcgccgccgtgatggtggcgcagttgttggcgcaatacgtcgagcttgaacccgacccgctgccggccctgcgccagacgctggcggtggtggccgggcggcaatggctgagccttggcgagctgcgcagcctgcgccccggggatgtactgatgctggagcaaggctcgggtttgctgctcgacctcgacggtcgcttgcacgcccgctgccaacagcagggcgacgcgttgcgcctgcaggaagaattgaaagcgccccttttggacatggagaacacgatgactgacgttgatgcggctacggccctggatgacttgccgctgaaactggtgtgccaggtcggcagcctggaactgacactcgcgcaattgcgcgagctgggtgcgggcagcctgttgcaactcaatacgcctggcgtggacaacgtggacctgatggtcaacgggcgtcgtgtcggccagggccaactggtgaaaatcggtgacggcctgggcgtgcgcctgctgagttttgccaccccatgaccggttatcagccgaacctgatcgagatcatcctggtcgttgcgacgatcgggctgatcccgttggcggtggtcacactcaccggtttcatgaaaatctcggtggtgctgttcctgatccgcaacgcccttggggtacaacaaacgccgccgaacctggtgttgtatggcatcgcactgattctgtcggtgtacgtgaccacgccgctgattggcgacatgtaccggcaagtggagggccgcgacctcaatatcgagcatgtggagcaactcaaggaccttggcgacgccctgcgcccgccgttgcaggcgcacttgaagcggttcgccaacgaatccgagcgcggcttttttgtgcaggccaccgagaccatttggtcgcctgaagcccgtgccgacctgcgtgacgacgacctggtggtgttgatccctgcgtttgtcagctcggaactgacccgcgccttcgagattggctttttgctctacatcccgtttctggtggtggatttgctggtgtccaacgtgctgatggcaatgggtatgtccatggtctcgccgaacctgatttcgatcccgctgaagatctttttattcgtgtcattaagcggctggtcgcgcctgatgcacggtctgattctgagttatggcggctgaaccctgcagggtgagtgtgcatttaaggggtgagtgatgggccaggacgtatttttatccttgatgaaacaggcactgatgacggtgctgatgctctccgcaccggcactgggcgtggccattatcgtggggttgagcgtgggcctgttccaggcactgacgcagatccaggaccagaccctgccccaggtggtgaagctggtggcggtgttgctgaccatcgtcttccttggcccggtactcgccgggcaagtggcggaactgggtggccaggtgctggataacttcccgatgtggacgcgctgaccgcccatggatgccagccttaccgcgcagtttttggaagtcgcctacccggtgatcagctccgcttcgcttgccgcctgccgcgccatgggcgtggtggtgatcaccccggcgttcaaccgcctgggcctcaccggcatgattcgcggctgtgtggccgtggccatttcgattccgatgttttttccggtgttcgaggcgctcacggcgatgcctgaacacggcagcgtgtttatcgccgggttgctgatcaaggagttcttgatcggcatcctgatcggcctgttgttcggcattccgttctgggccgccgaggtggcgggggaattgatcgacctgcaacgcggctcgaccatggcgcaactggtggacccgttgtcatccggggagtccagcgtgatggcgacgttgctgacggtgatgctgatcacgctgttcttcatgtccggcggttttatcctgatggtcgacggctattaccacagctaccagttgtggccggtgacctcgtttaccccggtatttgccagctccgcgctgctggcggtgttgtcgatccttgaccagatcatgcgggtgggcgtgctgatggtgtcaccgctgctgatcgcgctgctggtgacggacctgatgctcgcctacctgtcgcgcatggcgcctaacctgcatatcttcgatttgtcgttgccggtgaaaaacctgtttttcagcatcctgatggtcatctacatcggcttcctgatccccatgatgctcgaccagttgggggagtttcgcggcaccgtcgaactgctcaaaaccctcgcgggcatggagtagcccatggcggataccagtgaagagaaatcccagccggccacggacaagaagctcaaggacgcgcggcaaaaaggccaggtcgccaagagccaggacctggtgtcgggcatggtcatcctgttctgcaccctgtgtatttccatcctcgcgccccgggccaaggcccaggtcacggccttgatcgacctcaccgcgcaaatctatatcgagccgttcgccaccgtatggccgcgagtgctcgaccatgccgagcagttggtgataggcatcaccctgccggtgatggcggtgaccactggcgtggtgatcctcaccaatatcattaccatgcgcgggtttgtgttctcggtggacccgatcaagcctgagttcaagcgcatcaacccggcggagggcatgaagaagatctttgccttgcgcaacttcgtggaattcatcaaggggttgatcaaggtgcacgtgctggcgatcgcgttttacgtggtgggcaagcacgcgttgcaggcgctgatggagtcgtcacgctgtggcgccgagtgcatggaatcgacgtttttcctggtgctcaagccgctggtcttcaccgtgctgtgcgcgtttatcctggtgggcgcggtggacgtgatcatgcagcgctggctgttcggccgcgacatgaaaatgacccgcagcgaaaccaagcgtgaacgcaaagacatcgacggcgacccgctgatcaaaagcgagcgccggcgccagcgcaatgaaatgcaggcgttggccaccaagctgggcctgggccgcgcgtcaatgatgatcggcaccaccgatggctgggtgattggggtgcgctatgtgcgcggcgagacgccagtgccggtgatcgtatgccgcgccgcgccggaggaggcgttattgatgctgcaggaggcatacgacctgggcattcctcacgcgccggacaagcccctggcttccgagattgcgcgtaagactgtaccgggcgacccggtgccggacgcatcgtttcaggcggtcgcggactggctggtagcggcacgcctgatctgaagacttatacctgcgcaaagtgcgtgtcgtattccaggctgagtgcctttgccttttccgggctgaaaccgcctttggccgccagttgatcaatggctttgaagtacttgtcctgcccgccgggcaaggtccagtcgagcatgcgaccgaccgtgtcgccgacgttcttgaagctgtgcacggtgccgcgcggaatgaacagcaacgtcccggcccctaccgtttgttcagccccgttgacgatcacctggtaggtgccctcaacaatgaagatgtattcctcctgcgagtgatgcaggtggtggggcgggccttcaccgggattgtggctggcgatgatcacggaagtcgcgccgccgctggcttcggtgctcagtaaaatacgcatgtcgagcccgaacggacgtaccggcaatgcatcttgcggggagacaacaagcgggagcagggcttggggcgataggttcatggtgttccttcaggggtggcagtagggaaaacgtgtcccgtcctgactaaaacaactgaaggcggtttttattcccgccactgtggcaagcaggcttactgtggcaagcaggcttcttgtggaaaacaggcttttttgtggcgagcgggcttgccccgcgttgggctgcaaagcagccccatcaaggccaccgcgtgctttcagttaaaccgaggtggcaggttttagggccgcttcgcagcccaacgcggggcaagcccgctcgccacaatgaatcacccagcaaagacttattcccaggacaaccgtgcattgcgccgttcaagggctttggatgcgaaaaacaccgccgaggccagcagcacgtagaacaccgccgtcagcgtgtaggttttgaagaattcgaagttgcccccggccagttcctgcatgcgtgcaaaaaactccgggtactgcaccagaaacgcgatggagctgtctttgaggttgtaaatgacctggttggtcaacgcaggaatagaggtgcgcaacacctggggaagaatgatcccggtgtagatctgcacatcgctgaagccttgcgccgtggcggcttccagctggcttttgtccaggccgttgtaggccgtcagcaaatacgccgcattgtaagcgcccacattggcggtaaagccgatgaccatcacctcgaacgggctgagccgcagccccagccccggcaggccgtagtaaaggatataaatgatgcaaatcagcggcgtgccgatgaaaaacgacttgtacgcctcgacacttctggccaccccggcgcgcttgctcaggcttaaataaaacaccagcacgcccagcgcgaagccggtcaccgagacggtcagggtcaatttgacggtcgccaggatacctgacgcgatcaatggccactgctcaacgaagtcctgataaaaactcacccagctctcaagcatcacgtttcttcccgaagaaccaggcgacttcgggaatcggcgcgtgcattgccagatctgcaaccgggccctgggcgacaatcttccccgcgtacatgaacacgacgttctggctgatctggtcggcaaaggcgatgtcgtgggtcacgcataccgtggtgatcttgcgcgcttcaagcttcctgatcagcaaagccacttcctggctcatcaagggatccagcgccgaggtgggttcgtcgagaatgacgatttcaggcttcatcaccagggttcttgccagcgctacgcgctgtttctggccgccggacagctgtgccggaaacttctttgcatgggcggccatatcaaagtaggccagctcttccattgccagggcccgtgcgtcttcacggcttttgccttgaagtttgcgcaagcccagggtgatgttgtccagcacgctcaggtgccggtacaaggcgaaattctggaacacaaacccgatgttcttgcgcagcgtgcggatatccagctgcgggctcagcaggtcttcgccgtgaaacagaatcgtgccctcgtcgggccgttccagcaggttcatgcagcggatcaaggtagttttgccgcagcccgaaggccccatgattaccaacgtgtcgccggcatgcaccgtaaggtcaatgccgttcaatacaacatgatcgccaaatgcctttgtcaggttgcttatgtgcaggatcggcatgttttcttcccggtatcactggtcggcaaagcggcgccgaaccatcagcatcgccacagcgaatattttatagatgcaaaagtacatcaggcctgcgaccaaatagatgttcacacccagcgaagtggaggccgtgagcgccttggcttgtccgaggatctcggtgaagccgacggtgtaggcgaagggggtgtttttcaaaatggcggtcagttcgttcatcacgcccggcagggagaagcgcagcatttgtggcagttcgatatacaacaccacttgcaggtcgctgaagcccattgactgggcggccacccgttcctggtgctcgaccgagcccagggctccccggaaaacttcggagatgtaagcaccgccaatcacacccaggctgaggttcatggcgatcatcggcgagggccgaatgcccaggctgggcaaaccgaaatacacgaggaacagcagcaccagcaccggaatcgagcgaacaatgaacaccagggcgctcagcacggcgcctgtgcgatggccggaaagccgccgtaacacggcgacccccaaccccaatgcaaaggcggtgatgaagcacgacagcgtgatgtagaacgtcgccaccacgccgtgcagcaacagccctatgacatcgaagaactgacgatcaagcatcagttacgacttcagccacttgtccatgatggcggccagcttctgcgggcccagttctttcaagtaggcatcgaagtcggcgcggatcggcgagccttgctggaaggcaaaaccgaggtggtcaacccccttgaaggagtagctgacggcgatgggcagtttttggtggaacttgtagttgtcgtacaccggctcttcaataaaagccagatccagattgccgttttgcaggtctgtgatcacttcattgtacgaagggtacaacttggcatcggcaactttgtaaatgcctttgggctccaggtcagtcttgatcaagtcggcgtacgccatgccgcgcgggtaaccgatgctgtattttttcaacggcgccaagtcagtcaaggtcaacttcttggatgccaggctcaccaggttaaaggagttctcataatatgggattgagaagtccatcactttcttgcgcttgtcggtaattgaaatgcccgagaacgcgaggtctgcctgtttgctggcaactgcacccagcatgccgtcccagtcatactcggtggtcttgattgtgcaaccgcgagacttgcagtaaccgttgaagatttccaggtcaacgccttgcagttgcccgctctgatccttgaacagcatcggcggcgagttgggtgaaacggcgacttcaagggttttccctttcaccaggtcactggcagaagcgccgacggcgaccaggctcagcaaggatgcaaacattattttttttaagcttcgcatatcacgctctcatcaaagtacagggaacacaccaggacggtttattccgttgagattggtgatccatcacacattcacagataactctcccaacaaaaagtgggtgagcctctcttatccaaaggggtgtttaaacggtcacaagaataagtgaggtgtggccattatttgcgtctcggtattaaaaggacgtgttcatgaagtggatccaatagtgtgaatttgtttagtttggatccaatgaaaaaatagtcacgttgtcacatttatattactgacacgtttagagtggcataactgaaatagttcgagcgtgaacttatattttttttagtgtaagtgcaccaaattggaactaaacgttttcgccttgtgggggggtgtgccgaatgttgagcactaagtagcacgcgaccgccagcgtgactaccgacagcgctgacagaatggataccgtggcttcggcacccgtcagcgacaacaaataaccgacggccaagggggtaagcgcctggctgaaatagaccggcgcggccattttgctggagaccagcgcatagtctttcaacggcacgatggcgagcggcaatgtgcttcgcacgatggctcgaagcccgttgccggcaccgtaaagtaccaaggcccaggccgcaaaacgttcggcgaaggcaagcatggacaaaccagcggcggtcatgaacaccgatatcagcatggtccacatggggtgtttgttgcgggtcagcaggtcgacgattcgcgaccccactgaggcggggccgatgatcgcactcagtgcgatggcggcagtcagggagttgccgcgttcttgcagcagcacgatcaccaccaccgagatagccgtcatcagcactgcagacagcgaaaacagcaccgtcatcagccaatagaccttcgggtccatggacagggctgtgcgggccgaagcctgtttttttccgggctgggcctgttggtgcggcaggcagtaccggtagagcgggtaaatgccgatcataaggaccaggccgtataagtagcaggtgccacgccatcccaaggtgtgcaccagcaacgccagcagcggccagatcacagtggtgcaaaagccggagatcagggtcacgccagtgatggttccgcgcgctttcattccgtagagcgcgcccagcgcgcagaagagggcgtcgtagagtcccgctgccatgcccattccaatcaacacccacgctgccaggaacaggggcagggtatgggcgctggccatgatccacagcccggccgccatcaggaaaccgtggcaagccagcacgcgtcggccaccgtagcgcacgagcagcctgccgcacgccgcagagaccacgcccgccgtcagcaagccaatggacacggaacccagcacccattcgcgcgaccatccggtttctgccaccacggggtctgcgagcacggccatgaggtaaaaagagccgccccaggtcaggatttgcagcaggcccagcagggcagttttaccgatggaaaggcttgggtggatgacggtggtgttcacgacggcgcagaaccttgtgttgcaggtatttgggggtgattaagtgccgaatggcgcataaaaaaaagcgacaaatactcaagggtattcatcgctttttgtgatgcaacgaccagcgctgcatctgtggcgagggcgcttgggatcagccgttgtctacatcgtgataaggcccgccgtagccgtcaccgacccgccaggtgatgttgtggttgtcgtcggtccactccgacggcttgagcgagtacttgaagtcctccgacctgcggttgttgccgtcgccgatatagtccgcgtgatcacgctggtgatcaccgctgcccaccgtcgcgcgggcatcccattcgcttttgcggaagtcaaagatgctctggtcctgcggcgcgtcgcgctggctccagtcagacaagtaggtttgcagccacacgtaggcttcgtcgccgttgggcttgagcaagccgtcttgtttgaagtcctggatctggtcccagttctgcatcgagatcttgtgcagcttgtgcgactgcacggtgctgaggatcgcgccgataaacgacagcgcaccggagaccagaaaacccaccggccccaggaacggaatgacccggcccgtgatgccgagggtggtcaacacaccgccgccggcggccaccaggctgctgacaccgccggccagggacagcgagccgccggcaattttcatcgggtctttctcgcgcacgccgtcgcgcagggtgaacgcggcttgcaccacactgatcacgccgcccgccatgtcggtggccatgccgatgaccttgatcgcactgctggcgaacttggcgccaaagcctgcaccggccacgccgccacggctggcaatgcctttttcaatgccttcctggaccttcttcgcaccttcgtcgctccaaccgccgctgttgagcaccttgcccacgtccttgccgtcgtccatggcctggtcaacgatgtcgaagtacttcttctggatggcttcggcgtccttgggcagggcgtggtaaccctcgcccggcttggcccacaggtcgggcagggaacggtcgaaacccatcagtttgtaggcgttggtgccgcgcagtttgtcgtaaaccttcaggcccaacgtggcgaagtgcgagccggtgccgatgaaaccgaggaagtcgttggcgatgccaagccgtttcatcggcgtgttcgccagcttgccgccctggcccacgagttggtagacgatacggcccatgccgatggcgccaccgaccgagccgagcacgccgttgtccttgaggaagctcaggttcttcacaaacgaactgcggttctcttcgctgaggcttggcatgatctccttgctcaccgcgtgctcgatgtcgctgaagctgatcacgccgtttttctgccaggtgtcgcccagggaaatcatcgccttgccgaagtcggcggcggcgtttttgtctttgagcagttggtcgacaaacttcgaatacacgcccagcgcctggcgtggcaggccgtcggcgctgcccttgagcatcgacagaatcgccagggtgttgtcctgggtggccagcgcggtgttgtcgtcgctgatcttgctcgggtcgtccatcagcttttcaacggcgtcggtatagccgtcgatctgcaggttctgcatgaagttgtcggccttggccgggtcgatgtcggcgagggcggtgtaagccgtctggatttcctgggtggccagttcggtcttgccgctgtcctgcagggacttgatgtatttggtgaagttctctgacgaggtgctgtcgatcagcttctggtgcacttcatcgaccttggcctggccgccgtcgaccttgcccagcgccgcgtcgtggttggacttgatgtcggcctggatggtcgagtcgccgagcaattcgctgatggttttgtcgatggacttggtgtcgaagatattgtcacgcacatcccgcgaggtgacgtcgatcggcggcgtggcagtgccctggttattgaaaccgtgttcgggaatgatcgacatgccattgtcggccatgctcttggcttccaccgcgcgcaggaatttggcgcgcgggtcatccttggcgatgctgccgtccttgaccccggcgcggtagctgtccaccagggttttcatcgacaggtcctgcacggtcagcgggttgccgctgtcgtctttctccgtggtggtgaggctgtccaccgacacgtccttgagcggcggcaggccattgtcggcgcgcaatttgtccacgtcggtggtctgctgcgcgatatcggtgcggtagccggagatctgctcgaacatctgcgggttggtttcttcgctgacgacgattttttcttcgctgccgcccggcttgtgttgggtgaacgcgatcaagcccgggccataatcgccgacgccgccgacgctcatgatgtcttcggtggacgacaggtacgcgtccggcccggccaggctgtagccgtcgcccttggctttctcgatgccggccagggtctggcccttggtggtgtaggcggcgaaggcgtcgggggtgatgtccttggagaccaccagcagtttgccgtcggcctgattgacgacgaggatgccgtccatgggcgtgtcgaccttgctgatatcccccagcttgagactggcctcatcctgtcgcagcagtgcctggccgggcagggactgggcattcttgatgtagtcgaacgcctgcgtgccttcacttgcatgcacggcgtgcaggaagttgtagaggctgctgccggcgttggggttggggttgctgatatcggcgccgggctgcggcagggcggcctcggactggctgatcatgtacttcttgccctggtgctcgaacaggatcaccccggacttctgatcctcggacaccactttgagctggctgaaatccaggtcgccgggcaggctggtgacttcttcataccccttggccttgccgtcggcgagggctgctttggtcaccccggcgctgttgaagctggcgaaggcctggggcgtgagctcttcggaaatcaccagggtctggccgctggccatttcgactttgaccacgccgtctttggcttcaccgaccgatttgatattggcgaggcgcacggcagggtcgtcttcgcgcagcagttgctggtcggggttgcccagggcttcacgaatggccttgccggcgggtgtgccctgggtttcggcgagggtgtgcaacaggtcgtagagtggcgtgccttcgtccggcccgccctggttgaccggcgctaccgcgtggccgaagtgcaggcccttgagcatgtcgaaaccgtcctggaccttctcggcgccttcacgggtgatcttgaacttgctgccgtcctgctcgaagtagatgacgccggcatctttgtcttcggacacgaccgtgagcttgtcgatgtcgagcttggcgggcagggcggtgacttccttgtaatcgtcgggtttgatctcactgggctttttcaagccttcgccggattgcgcggcgaggactttgggcttgaaggttttatcgcctgacccggcggccgccaaggttttggccttgttcagcagcgcatcgaagatacgctccggtgctttggtttcgcctgcgcggggggaggcggctttctcgggtcggttgatcattattcagtccatgtgagtgggggcgcacgaggactcgatattaggcgttgatggggtgtgaaattggggttatgggtgagatcgcacaagctttcacagctgtgaaatgagggtgtcatttgggtgtgaatagggcatgtccgttatttaggtgacggctgatattggttcggctcttacagcgggtcgctttttgaagagcgcaaaaagtaatcaaatcaaaagcacggtggcctgatggccggcctgagtggttgaagcaaaagcgctgcttttgtctgggcaggttgcgttccttcagatatatgaatacccaactgtgggagcgggcttgcccgcgatagcggtatttcagtgacaaatgtattggctgacacaccctcatcgcgggcaagcccgctcccacactgaccgctttttgcttcactccactcctcagcgatgctgaaaccgcggcaacgaagcaatccgcaacttgggctcctgcaaccgcgccaagtctgtggcaatctgcgcccgccaaaaatgcgcccccgccaactgcgcatcgacccacgcctggcgcaacaccaccttggccttttccactgaaccatagtgcccctggcgcaaggtcaattgcgccttgatccgcaacatctgcggcacaaaccagcgctcatgccggcccagcgccaattgcaaggtgtcttccaatacctccagcgccagtttttccaggcccaggcgcgccagccccagcgcatattcacagcgcagcatgctgtagagctggctgtcaccctggccttgcagttcatgcagcgcttcacccaactgcggtacgccttcttccggcgaaccttggcgaatcagcaggatgctttcaaaacacaaccggaattgccgccagatatgcaggtcctggcgggtggtgctgtcttgcagcaggcccaggtaatggcgcgcctttggcaggttcgaggcgagtaatgcaaggggaatggcgcccaggcacagggtgtaccagagggttgccggatgatcgagcgagatggcctcgtcaacgcagctgccgatcaggcgcagcgccgggtcgacgtcgccctccagcaactgcaccttggccttgaggcagcgtgcggcgatgcgttggtcgaaatgcacgtcgatgatgtgcgagcgcggcgccgacggtgagccgagggcttcgtcgatgttttgccgtgcaccggccaggtcgcccatatggaacaaggccaccgcgcgcatgcgcttgccgagcagttgctggttgccgctgttgttcaaagcgatgtaacgctcggccagctccagggcttcggtgtactggttgcaaccgacgcggtcggtccacaggccccacagggcgcgcaatttgtgctcggcgtcaccgaggtcgcgggcgtcttcgcgcacctggcgccaggcttcgcgcatggggccgccggtgccgtaggtgagcatcagtacactggccaaggccgtctgcaacagcatgcgctggcgcaccggcaaggcgctgatcgcgtcgcttgccaggcctttgtcgacccaggtgcggcactcgctgaccagcgacaggcgcaaccataacggcacagcacccagggtcagctcaatggccatggccaggttgccgttgggtgaatacgcccattcgagggccgagcggatcgtattgctctcggggccgtagagggcgatccaggtttccggggacagcccgtcaagggtctgcccggcttcctgcaacacgccaagggcgtagtgtgcgtggcgctgcgcggttgagttggcctcgccgtactcgatcagtttttcctgggcgtaggcgcgggtggtttccagcaggcggtagcgcttgagcagttgcgattcaccggcgatcagcagcgacttgtccatcaggctttccagcaagggcaacgcgttgcgcgggtcgagggtgctgctggcggtcatcgccttcacggcgtcgagtgtgaaggaaccggtgaacaccgccagttggcgcagcatcgcctgctcgtcgtcgctgagcatggaataggtccagtccagtgtcgcgctgagggagcgatggcgggcgagggcagtgcgccggccggtcatttgcaggcggaaactgccgtcgagcaggccgaccagatcctggatgccgaaggtgcgcacccgggctgcagcgatttcgatggccagtgcattgctgtcgagcttgcggcagatcgcactcacggccgccacgtcggcatcgttgaagacaaattcggggtcgagggcgcgcacgcgctccacaaacaggcgcacgcctgaccaggccagggcttcgccgacgctgaggctgacgccttcgtcgggcacttgcaatggcgccaggtcgtgcacacgctcgccgtcagcgcgcagcggctcacggctggtggttagcacgcaacaatggggcgcggcacgcagcagggtttcggcgatatcggcggtggcgggcagcacgtgttcgcagttgtcgagcaccaacagcaggcggcgctcggcgagggtggccgcgatgctgtgcagcgggtcgtcgctgatggtctggataccgagtgcgctggccagcatgccggcgacccattgcccgctggtggcgggcgccaggtcgacgaagcaggtgtcgaggttgaactcgttggccaggttgtgggccacggccatggccaccgtggtcttgccgatgccgccggggccggtgatggtcacgaagcgctggctgatgacctgaccggccaggttggcgaccaaggcatcgcggccgatcacttcgccggccggcgcggggaggctgggttcttcaacacgtgcaggaggcgcaggcaagagctcttcgccggcggcctgcacggtaacgggtgccacgaagcgatagccccggcccggcacggtaacgatgtaactgaaattgccatcgtcacccagggcccgacgcaaggccacaatctgcgcccgcaggttgcattcctccaccacgaccttgggccaggcgaaggagatcagttccgatttctccagcaattcgccggcgcgggtagccagggcgatcagcaagtacagggcgcggctacccaaggtgacgggctcgccgttgcgcaacaacacgtgctggcgtgccagtaacagaaaggggccgaagccgatggcgctctcggtggaaaccggggccgggtggtctgcgtccatacaggacactgcgtggggcttgctcgagctcatcaattcgtcctttttatagtcgggcttgttattggcgatcaggccattcgcccttttgggtgcagatgtgcagcagcagtcttggaaagttgatgtcgatcaaagtgtcgaaaaggccaccctcctttggggtgtgtcgtttttatggcgtgtcacggagcctgtctcagttgatgagactgtctcaaagctgaaacattttattactagaaacctggataaagcagaatgtatgccagttggcatgtaacgaagatgacaacaaccgcatgaaatttatggtgatttttgtggtcttcggcgacttttcggcacgctcgttcggaaaggcgaatatttctaattgtgtcgttcgggatgccgaataaaacggcagtgaattggcgctgtttttccggctgtgtatcgcactgtatccccgcaccagcctgatacacctgcatgacgttctgtcgtgtttgcgacacagaccggatacacgcctggctttaactctgttcaccagccggcgctggcggtcacccaccgtcacatgcgccctggccacactcagtcaagccaggagatacaccgatgaagcgtccttacgcagccctcgcggccacccttgccctgtccctcagcgctttcgcggcggtggcccatgccgatgaggccaaaccccaggaaaaatgcttcggcgtggccctcgccggtgccaacgattgcgccgcgggcaaaggcacttcgtgtgccggcaccgcgaccgccgactaccagggcaacgcctgggtgctggtggacaaaggcacctgcacccaaatcaagacgcccaaaggctacggcagcctgacggagcagccatgagccgagccgccgcggcggtggtgatccgccgcctgctgcctgaagcgctgctgttgctggtggcgcgcgtgggtatcgcgtcggtgttcttcctctcggggcgcaccaaggtcaccggctttctggagctcaaaccctcgacctacacgctgttccgttcggaatacgccttgccgctgattccgccgcagtgggccgcgcacctggcgacgtatgccgaacacctgttcccgctgctgctggtgctgggcctgctgacccgcccggcggccgctgcgctgctgggcatgaccctggtgatcgaggtgttcgtgtaccccgacgcctggccggtgcacctgacctgggcgggcctgttgctgccgttgctggcctatggaggcggggcgtggtcgctggatcgcgtgttgttttccaaacctttacttccttgatggagactttctgatgcgcatgctttcttccctggccattgccatggccctgaccgtcccgatgctggcccacgcggccgatgcgccgcagcccggcaccggtaaaagtgtggtgatcgtgcccggctcgtttgtcgacggttccggctggcgtgtggtgcacgacatcctgattcacaagggctacaaggtcaccgtggtgcaccagggccatgaaaaccttgctgcggatgtggccgaagcgcgtgaggtgctggagcagcaagtcggcccggtggtgctggtgggtcacagctccggcggcgcggtgatctcgattgccggtgaccgtgacaaggtcaagtcgctggtctacgtctcggcgctgcagccggaagtgggcgagaacatggcccagttgatcggctccatgccggcgcccagcgatgacatcaagccgagccgcgacggtcacctgttcttcgaccgcaccaaattcaacgccgactttgccgccgacctgaccaccaaccgcaccgacttcatggccgcctcccaagtgccggccaccacagcgctgttcggcggcaccgtgtgggccgcggcctggcacaagaaaccgacctacgccgtggtctccaccgaagaccgcgccctgagcccggaccttcaacgctggatgtacaagcgcgccggttccaaggtcaccgaaatcaaggccagccactcggtgtacatctcccagcctgaggctgtggcgaaggtcatcgaagacgctgcgtccgttatcaagtaattcaccccaaccctggagaaatacccatgaacactgcactcaagtcccgtctgagcctcgccgctgcagctgccctggttgccatggcatccgccacgttcaccacggccgccagcgccgccgaccagcaggaaaagcccggccgctgctacggcgtcaacacctgcaaaggcaccagcctgtgcgccactgccaagaacgactgcaagggcctcaacagctgcaagggcgaaggcgtgatcgtcaagaccccgtccgaatgcctcaaggccggtggcacgttgactgagccgaagtaaaccacccggcgggttccttgcgggcccgccaccttttctttgcggagatccgtcatggcgatatccaaccctcacttttcaggctacggcctggggctgcgcaaggagcattactgcgacttcctggagacctcggtgcccgtggatttcgttgaagtgatctccgaaaactttatggtcgaaggcggccagccccggcatatcctgcgccaggtgcgcgagcggcacccggtggcgctgcatggggtgtcgatgtcgattggcactgccgaggggctcgacctgagctatctgcgccgcctcaaagcgctggtggacgagatcgagccgctgtttgtttccgatcacctgagctggtcgcgcagcggcggcttcaacgcccatgacttgctgcctgtgccctataccgaggaggcgctggacctggtgtgcagcaatatccatcaagcccaggacgtgctgggccgcacgatgttgtttgagaacccgtccagctacctggcctttgacggcgccgagatgagcgaatgggcctttatcgccgccatggccgagcgcaccggctgtgaattgttgctggacatcaataacgtgtttgtcagcgccagcaaccatggctttgacgccctggcgtttctcgacgggatgcccgctgaacgcgtgcggcaggttcatctggccggccatagccagggccgcgatttgttgatcgacagccatgacagcccggtgtgtgccggggtctgggcgctgtacgccgaggcccgcgcccggctcggcccggtggcgaccatgatcgaacgtgacgatgagattccgccgctggccgagctgcttgaggaactgtccatggcgcgggcgttggggggcgggcgatgaagctggcgcagtggcagcaagcctttcgtacgtggctggtaagcgcttcgcaagaatcggcgcaactgttgggcgatcaccacgcgggcctggcggtgtaccagaacaactaccgggcgcaattggtggggtgcctggagcaggcgtttcccaacctgcgccgctggatgggggagcaggcgtttctggcggcgagtattcaccatatcgaccggcaaccgccgcatgcctggaccctggacgcctatcccgaggggtttcatcacagcctcaaaatacagtttccccacaaccccgatgtacacgagctggcctggatcgagtcggcgctcaatgacgcttttgtcgctgccgatgcccggcctttggcgatagacaccttggccgggctggattgggacacggcggtgctgcaactgagcccgtcactgcgttgccacgccttgacgaccaatgccgaagccatctggtcggcactttggcaggaaacacccccgcccgaagcggccatgctggacgaggcaggtggcctggtggtctggcggcgtgcgttcacttcgcgcctgcgccaggtggatgccttggaattacaggccctgttgcacgtgcaggccgacggcagttttgccgggctgtgcgaatgcctggtgcagcgcctgggggaagacgcgggtgtgctgcaagcgggcgaatacctggccggttggctgggcagtgaatggattgtgggggtgagtcatggttgaacgtcgtggttttttgctgctggcggcggtggcggtggccgcgccggcctttgcggtgcaacaggtcagctccgatgagcagacgttcagctatgaacatgccgggccggaggaggggcacgcggtgattttgttggcggccgacgtcaaggcgttcgttgaagtgacagcgccgctggccgcccaggggtatcgcgtgatcgtcccctacctgcgcagcgccgatgacgctgcactcggccaggatgtgctggagctgatgaacgccttgcacattcccgaggcggtgctggctggcgtggagtcaggcgcgcgggtggcggcacgggcggcgacgctgaagccgagccgttgtgtggggctggtcaccgtgaacagcgcgccgcacgccggttttgccgaggcggtggccctgatggcagagacgggccattggcgaacatgaaaatattgacagccaggcaataggccactgaaaaaaatcccgtctgcccttactctagaggccttcgtcacctgtgtggattgttcatgtcttctgtcgccgatgggttgccctccaataaacgcttgccggcggtgatcgccctgtctttggggattggcatggcaaccctggacacggccatcgtcaacacggcgctgccgacgctggctcagggcatcggcaccgattcggcgtcagtcatctgggtggtcaacgcctaccagttggcgatcatcgccacggtgctgccatttgcgtccttgagcgatgtgctggggcaccgccgcgtgtatctgggcgggttgctgctgtttattgtctcatcgctgttttgcgggctcgccggctcactcttgaccctgaccgccgcgcgggtcgcccaagggctgggcgcggcggccttgatgagcgtcaacaccgcgctgctgcggcatatctacccctcgaaaatgctcgggcgagggctgggctacaactcgctggtggtggggttggcctttaccctcgggccgacggccgcgtcggcgattctgtcagtggcgacctggcattggctgtacctgatcaacgtgccgctgggcctgctggcgctggggttgggctttcgttcgttgccggtgctgccattgaccgggcacgccttcgaccgcattgcggcggtgctgtgtgccgggctgttcgccttgctggtgctgggcctgggcacggcggtgcacggggcgcagggcgccttgaccctggggttgattgcagtggcgctggtgtgtggcgccttgctgttgcgccgcgaggccggtcacccggcgccgatgctggccgtggacttgttcaagcgcccggtattcgcgctgtcttccctcacggccatctgcgcgttcagtgcgcaaggcctggcgtttgtctcgctgccgttcctgttgcaggcggtgctggggcatagccaggtggagaccggttttctgatgaccccgtggccggcggtggttgcggtgatggcgctggtggcggggcgcctggcggatcgggtgtcgctgggggtgctgtgcggcatcgggttgttgatgctcagcgtcggcatggcggcgctggcgaccctgggcagtggcgcatcagcctttgatatcggctggcgcatggcgctgtgcggcgccggtttcggctttttccagtcacccaacctcaaggccatcatgaccagcgcgccgctggcccgcagcggcggagcgagtggcatcgtggcgatttcgcggttgctggggcagacgctgggggcgtcgttggtggcgttctgtttccacttgtccctgggcagcggcccgcagatcgcgctgtggctcggttgcgcgtttgcgctggcgggcgcggtggccagctggttacgcttgttgccctatgacaaaaaggtgtgatcgggcgttgtaaaacaccgttcgggaaggctaccgtggcgacctgaatatttcgggatgtttcagatttatgtccagcctggcccaacgcaccgctgatgtttcgtcccgccgcgccgcgctgaccctcgctttatgcctgcccagtgacgtgttgctctacctgctgctgcccatggaatcccaggcgttcggcatcaccctggcccaggccggtgtgctgctggccgccaaccgcctggtgcggattttcggctaccggcatgtgctgaatttctacgcgcgccatggcgaccggctgacatgcatgatcgctgccggcgctgccaccgtgtgtgcgctgggcaactcgatgctgtccggctttgccgcgctgctcgtgctgcgcttgatctggggcctgtgttttgccgcgctgaatctgtcgacacaagtgctggcgacttccgagcctgccgggtcggcgcgccgggcggggcgctcacgggcggtgattgcgctcgggccgatgctcgcactgccgctgggcggttggctgacattatgggccgggccgcggccgatctttctgattctcgccgggtgttgtctgttgggcgtgtgggcagcgcatgggctgccccgcgtgggccataatctgcacagcacggggcgccgctttaaatggccggacagtgtggcggcatggtccttcattgagggcgtagcgctggacggcctgtttatctttggcctgtcgatccaggcgcaaaaaattctcggcggtgacgcggtgctgatcgccggtggcttgatggccctgcgctacgcctcggaaatgctcctgagccccttgggcgggcgcgccgcgcaacactttggcgcgacctcgatgctgctgctgttttcgtttatgagcgccctggccctgaccgcgtttggcagttactgggtgatcgccggcgcggcggcagtgctggtgctgcgcgcgctgcaactgccgctggtgaccacgttggtggccgagcgcaacccgggctcgatgcgcgtgtcggcgctggcctccaactcggtatggcgtgatgtcggcgccggccttgggccgttgctggctggcctgctgctgccggtggcgtcggcgcattgggtattcggcctggcaggcgcggccatcgccgtgagcgcggtgttctgctggcgtgcaaaggtttccaactgatcgatgtgaggttgtgtgtgtcccttcaagaaaacttcgtacaccggctggatgaggcgtatcgacactggaccggccagggactgccggccccgcaacacctgagcccgcaacagcgcctggcctggctgcacagccaggcgccgtatagcctgttggcccatgacggtgccgccgacccgcgttttacctatgtgaatgactgcgcgttgcagtgcttcaaatacccgcgcgagagctttatcggcatgccttcgcgcttcagcgcctcggagctggaccgcgccgcgcgccaggtgcttctggagcaagtcaccgccaacggcattgccgacggctacagcggctggcgggtggatgcgcacaaccagccgttcatgatctacgctggcgtggtgtggaccctgctggatgaagccggccagccgaacgggcaggcggcgctgttctggccggatgaacagcgcatcggcgtattggcttaagcgcttttaaggctttccagccaggcggggtcgagccgggtttgcccggtgtcgatccccagcgcctgcatcttttctttatgcgcctcgatctcgccgatcaattgcgcctgtgcgctggagttggcgtccagctcatgcatttgcgtaagccccaagtgataaaaacgcagcactttgagcgcggtcgggtcgttggcttgcacccgctcggtgaccttgtgcatcacattggtcacgctcatgaggctgcgcttgagttgccagccatacaccgccggggcaaaccacggctggctccagaacgggccacgcaccagggcgagggtgatcagcaccccggcaaatacgccgccgacattgaagcgaaaattgtcaccgccgggctcgccgaacagcatcactgccaggctggagagcagcatggccagggcgacgaacagcacggccaggatgatcgtgctgcggcgggtctgttggcgaaaggtgacggggtcgcagggtttgagctcgaacatccgggtcaggtctcagaagggggcggggtggcatcttcgcatgcttgcagacatcaagttgaacgatgacttgcgaccgtttctctaaacctgtgtagacccactgaggtaaaccgtcatgagtgaatacaaacagccgccgcccggcacgccgaatcctgaccgcacacccggggaggaggagcgtgacaacgatgcgttgcgccccaatgacccggcggagcgtcaggacgacgctgtggagcgggttgaggaagacctggagaacctccacgacaaagcccgacccttgtaaacgcgggcaaaaaaagagccgcccgacgatccgtcgggcgacttgaagggatgacctgaaccccagcgctgtgcggggctgatgtttatttgggcgcgacccaggtgacctcggtaatcccgaacttttccgcccaggggcgggtggtcttcttcacttgttcgtggcccacgcggccaatacggctgacgtgtgcaatgtcggcatcaaccgccgcccagtgccaggcctcggcgttattcatcacttcggcgcgcaccacaaaggatttcggttgaccgtgcagctgatagtggatggtgtagatttttgcggtactcatgttgcctccctgtcttgttatagatggataggttggcgctcaaaaaggttcattcaaaatgacaaatccgctgcctgcgcggcatagtgtcgctatcgcctcgcactcaaggattgcgtcatgcctggattgactcaccgccagctttacctgcaacgcctgggctacgattcgccgccaccgcctacgctgcaaaccttgcgggaattgcagctgcgccatgtgtgcaccttcgccttcgagagcctgtcgaccttgatgcacttgccggtccccatcgatttgccgagcatcgagcaaaaagtcctgctcgatgggcgcggtggttactgttttgagctgaactacctgttcctgagcctgttgcaggcgctgggtttcgatgcgcgcggcctcactggctgggtggtgatgggcgggccgccggacgcacgcaccgggcgcacccaccgcctgagcctggtgacgctggacggtgtgcgctacatcagcgatgtgggctttggcggcatggtgccgagcagcccgctgcaactggacaccgaggccacccaggccacagcccacgaaccgtatcggctgacattcaatgaaggcagttacaccctgtgggcccaagtgggcgaggagtggcggggattgtatgtgttcgacttgcagccccaggcggatatcgattacgaaatcggcaactggtacgtgtccacgcacccgggctcaaccttcgtcggccatttgaaggcggcgttgttggcaccgggtcaacggcatacgctaagcaacgccaactatgccgttcactcgctggaccgccccagtgaaaaacgggcaatcgacagcgccgatgaactgctggccttgctgcaaaccacctttggcattcgcctgccggcccaaccgcaacttcgtgaagcactggagcgattggtcaaggcttgactgtccgcccaagccccctttgtgtcccccaaaaccctcaacgccgcgcagcgcctgtcttagtgtggaacccaggttccacacgataaaaagagagggtggccatgcgccgcatcctgctgctgctcgctgtatcaggcctgctcacggcctgtgacggttctcccgaacacgcctctgaacacgccggcgcaggcatgcctgccgacccggcgctcgcccaggtctacgacaccagttgcaagttgtgccacgccaacccggcgtccggcgcgccgctgagcggtgaccgtgcggcctggagcccgcgtgtcgcccagggcgcggacacactgctggatcacagcatcaacggctacaacggcatgccgccgatgggcctgtgcatgcagtgctccgaggcgcagttcctcgcgctgatcagctttatggccggtgttgaactcccacaacaataagaagaggtggtggatggcgctttcacgacggcaactgttgcaacgctcaagcttggccggggcttttctggcagtgacgagcaatccggtgctggcccaactcgtgcgcgcgcccaggctgatcccgtggcgtaactggtcaggcgcgcagacctgcctgccactggcacgcctggcgcccaaggatctggatgagctggtgcaggtgattcgccaggccccggggcagattcgcccggtcggctcggcccattcattcagcgcgctggtgcccactgacggcaccttgctgtccttgagttacttcaacggcctgctcgaacacgaccccgccaccctgcaagccacctttgccgccggcacgccgatgtcgcgcatgggcccggcgctcaaggcggtagggcaggcgctgccgaatatggcggatatcgattaccagaccctggccggggcgatttccacgtccacccacggcaccggtgtggggtttacctcgtattccggctgtgtgaccgggttgcagttggtgacagcccagggcgaggtgctcgattgcgatgctcagcgtcaccctgaggtcttcagcgctgctcgcgtgtccctgggtgcactgggcgttgccacccaaatccgctcgcagaaccgcgcgccgtaccgtctgcgcgagcgccaatggatcgccaaaaccgaggaattgctggaggacgtcgataagaacacccgggaaaaccaacactgggaaatgctcgtcgtcacccattccgactacgcgctgtccatcgccctcaacgaaaccaccgaccccgaaaccccgccggtcgacccggccgaggcgggtggcaatgaattcgtgacaatcatcgaaaagcttgacaaatacaccagcgatttccccgacacccggcgcaccttgctcaacagcctgcgttttttcgcgcgtttcgatgaccgtgtggctgagtcgttccaggtctacgccaacgtgcgcaatgtgcgcttcaacgagatggagtactcggtgccggccgagcacggcccggcgtgcctgcgcgaaatcctcaagctgatcaccgacaaggacctgcgcacctggtttcccatcgagtaccgctacgtcaaggccgatgacattcccctgagcatgttcgaaggccgcgacagctgttcgatctcggtgcaccagcattacgccatggaccaccacaactttttcgctgcggtggagccgattttctggaagtacgccgggcggccgcattggggcaagttgcacaccctgaatgcgcgcacgttgcagccgttgtacccgcgctgggatgaattcagccgcgtgcgccgcgagttggacccgagcggaaaattcctcaacgcccacctgtcatccattctgggagtggcctgatgaaccgtcgacatttcgtattgggcaccggcgccgtgttggtcgcgggtgcctggtggctgcgcccgggggatcgtggcagcccgtacaccgactatttccgcacgctcaatgccgagctgaaggctcacgggccgatgcgcccggtgatgctgattgacctggaccggctggatcacaacatcgacgtggtgatgcagtcggtgcagcgcggcggcaagcacctgcggctggtggaaaaatccctgccgtcgccgggcctgctcgcgtatatcgccaagcgggcagggacgcagcgcttgatgtcgtttcaccaaccgtttctgaaccacgatgcgcaggtgttccctgacgccgatatcctgctcggcaagccgctgccggtgcgttcggccgagctgttttatcagacgcacaagggcgcgttcgacccttcgcggcagttgcaatggctgctggatacgcctgagcggttgcagcagtatctggcgctggctcaagggctgggcacgcggttgcgggtcaatattgaactggatgtggggctgcatcgaggcggtatcagcgataacgctgcgttggggcagatgctgacgttgatcagtgccaacccacagcatctggccttcgccgggttcatgggctatgacccgtttgtgggcatgggcgtgccgggggttctcggttcgccccaggcgctgtttgatcaggtcatggtgcgctacaacggttttgtggatttcactcgtcaacagtttgccgggttgtggctggaggggttgaccctgaatacggcggggagcccgagttatcggattcaccagcaggaaaggctcagcacggaagtgtcggtgggcacggcgctgctcaaaccgacccattacgacctgccgtcgctgagtgaacatgtgccggcggcgtttattgccacgccagtgttgaaaagcaccgggccggtgaatattccggcgctggatggcaagtcgcgggtgttttcgtggtgggatccgaaccagcgccagacgttctttatttatggcggtaactggatggccgaattcgagtcgccccaagggctgcaaagcaatgatctgtacgggcgcagttccaaccaggagatggtcaacggctcggcggcagtgggtttgaacattgaggatcaggtgtttttacgccccacccagagtgagtttgtgctgttgcagtttggggatttgctggcggttcgcgggggcaaaatcgtcgagacctggcctgtctataacaactgactgacgcgaacctctgtgggagctggcttgcctgcgatggcggtggatcattcaccaccgccatcgcaggcaagccagctcccacatgttcagtcgggtttacagggcaaagggaatagtgagcttggcccataacatatcgccttccggccggttcttcacatcaaactccttggcccaacgcacctccgcactggcgtatttgagaaaggtgaaatacaccgccgggccgatcgcaaacacctgcccgcgtacgccgtcattcacgtcttcgccatagatgttcaccacggtgcgcccgttctgtttgtcgtcggtggtttgcttgaggtaatagccgttgacccccaggctcaagttgtcggtcaccttgtagctggccgaataatcgaagtgaaaaatctgcccggagcggtaatcggtgtcgtggttttcttcgttgaaactgtaggtggtcttgatcgacagctcggtgcggtcgtctggcatccaggtggccgacacgaggggtttgtaggtgtagaagttattgctggtattggccaggcgcgtggcgtcgtactcgcccgtgggcagggtgatttccacggcggcagccagggtcagtttcgggcccatgtcccacaggatgatcggtgccagggtggtgtcgcccatgctttcgcgcgtgtcggacataccgaacagcgaaacctgctgcttgaggtaaggctgggcaatgtagccgcccaggcgtccgccgaagatgcgcacggggctcaggtagtccaggcgcgggatgattgcgtcggacttgatgcgcacctgcgaaactttgccgcccagggagctgatatccagtttgcgggcctggtagtggttgtaatacaggttgaaggcgaacatgtggtccggcaggttgttcacgtccaggggcaggatgtagaagccatcggtgccggggccgatgttgtcgacgccgccctcggtggccagggccggcaggctgatcaggctcaacaacgcgagttgcagcgggtgaagtgtgcgggtggggttcatgtctggcctcgttcttattgttagggcactgctggccctagaaataagccctcaggggctggcagggcagggttttggaggacagatagggggactttgccggacaggtttcactcagggtgcagcgactcttgcaagcgcctatgattgtcagaatgtttctaaaacaagaactgaagtactcagtcaggaacccgtgatccatgcaaaggaaagctgttgacccgcaattcgagctggcgctggtgtcgccttttctgttgcaaaccctggcacaggtggtttcgcagaagggcgccagtgcccaagcgctgtgccgcgggctggggtttaccctggccgacctggatgacccctcgcaacgcatttcctatcgccaggccgtggcgatgatccagcgcgcgctcaaggccttgcccgatcagggcctgggcctgtgggtggggcatcagaacgtactcggcaccctgggcctgctcggccatgtgatttccctgtgcaagaccctgcgcgatgcctttgccatcggcgagcggcatcagcacacctccggcggcatcgctaccacccgcacccatgaaacgccgcaggaagtgtgcgttgacgttgaatgcctgttgccctacgccgaagtccaggtgtttgcggccgaagagttctttgccagcctcatggtgtatggccgggcgttggtgggtgccgatttcaagccgcagcggttggagttcgtgcatgcggcaccgtcttatgttgccgagtatcagcgcctgtttggtacggacgtgcgttttggttgcctgcacaatcgcatggtgctggcgccgcactggctggacacgcgcctgcccaatcatcaccccttggcattgcgccaggccctggatttgctggagctggaaagcgctcagctgcatcagaagatggacctgatccaggcagtggagcgcgccatctcgcgggatctgcagggcagccaactggagaaggtcgccggcgacctgaacatgagcgggcgcaccctgcgccggcgcctgaccgagcacggcctgaccttcgaagcactgctggagcaggttcggcgcgcacgcaccatggggttgctggggaatccggggttgtcgatcgagcgcatcaccgaggaagtcggttacagcgacgtacgcagttttcggcgggcgttcaaacgctggacgggggtgagccccagtgcgtttcgcggtgatgggggagggttggcgtagtccttagggtggtcccgttcaggacgccggtctagagcggtttcacgaagctgaggagctttgcggtcgagcgcgcaaaggtttgctttttggcgaatcaaaaagcgcgccgatcgcctgacgcgcacgggacagccggctcatgacggtgccgatcggcaaatcgagcatctcggcggcttccttgtagctgaaacgctcaacgcccaccagcaacatgacttcgcgctggccttcggggagtttctccaccgcttcaatgatttgccggtgcatcaggtcagactccgggttgggcgcctcagggtcgctgacggtttccaggaattcgtcgttccagtccatgcgcgagcggctgcggaccttgcgcgaacgcagttcgttgatccaggtcgagtggacaatcgaaaacatccagctcagcaccgacgtgtcgggctgcaactgatgggagcgttccagtgcgcgcacgcaggcgagctgaaccaggtcttcggcatcgtgcttgtcgccggaaatgcgcaacgcgaatgcccacaggcgtggcagcagttctggaagcagtgcgggtaagtcagcaccggtgatcgacatatttcctctttttatttcttgatgcctaaaatggtgcggtcaggctacgaggtcgataccgtagcggatgcctgtgtcgcggcgtcctttttgcggtgctgagggtccttgggtgacggtaaattgtatcaagatgctgacaaattgtatcaatttggatcgattttgaaaggttattgacagcttatgcaggtaccaggccaataattctgacaatcgtgtcaggaaaattacccgtacacatagtgaaacatataagatttattcggccctgggaatattttcaattccagggtgttctcttagagtatttgcacctgtcactgagtgcctgtcggttgctttaaagtttttttgacctgttgcaacgttaaagatgatatcaatatgatggcctgtcgctacccgcagatcggtcacttcggctcacaaagccggacatcacacagcaataattgatgaatacaaacggagagataaccccatggtagcggatgatgccttgctaatggcctatgttgacggcgagctctcgtcgcaacagaaccaagagcttgagcggctcatagacgcttcgccggatctggctcagcgagtctctcggttgatggcttcctgcctgccttatgaggaagcgtttgctcgccagaacgtgccaccggtgcccgagagcctgaagctcagtatcgcggcgttggcggctcagcattcggctgcgcagtcgacggctggaactgttccgacgagtggagtgaactcttccgataaagcagacagcgttttctcgcgcctgttcgcgttcctccaacctaaatttgcatggccggccctgacgttcgttgcgggtgctgcctgctatgccctcgcgcttcaagttggtgcgttcagcggcgccctcaagcccggttttgatgcgagcgctccggctgttgcccagacctctccctgggtgcaacaagcggccgcgtaccagcatctttatacccgcgaaaccgttgcctacggtgcccagcccacggaagcggtgacccagaccctcgccgatatccgccagatagacggcctggccctgcgtgttccggacctgagttctgccggcctgaccttcaagcgggtgcagcgcctgcgcttcaacaacaaggcgttgatccagttggtgtaccttcccgccaatggcgcgccggttgcattgtgcgtgatgaaagagcccaagccggatcagtccatcgcacaacagagcgtcgcgcagatgaacgtagtaacgtggcgtcagtctgaactgggctacgcgcttatcggcgagcccgaaggtgtagacctcaacgccgttgcccgacttgtcgccgaccgaagtgctgcccagctgttcgctgctgtgcctgcaccgatgtggatcgccgccatccagaaataaccgtgctggggtcgggcattggttcccaatgtcgtgatcccagatagctagatgaaaaaaaccttctcgctgaaaaaacgccattacctgcctcttgccctcgctgctggggtggtcacaggcctcggtgcctggctgctgccgtccgtttattcgccttcgccgacggccacgcaaatcgtcgatgagatggaagcggtggccggtggtgctcatcccgggtttcgtcgtaatcatgccaagggccattgcatcagtggccgctttgaaagcaacggtcatgcggtagagatttcccgcgcatccctgttacagcctggcagcgtgccgctgatcggccggttgtcggccgccggtggcgacccgtcccaagccgacgtacacggcatgatccgcagcatggccctgcgcctggccgccgccgatggcgaaacctggtacatggcgatgaactccgtgccggtgtttccggtaaatacccctgaaggcctgtatgagcagttgcgtgcctcaatgccggcgtacggcggcagcggccctgacccgcaaaaaatgcaggccttcaaaaacgctcaccctgaaatgcgtccattcgagacctggctggcggagcatcccgaagcttcaggtttcgacaattcgaccttctacagcgtgaatgctttccgcatgatcgacgctcagggccgggtgcacttcgtgcgctggagcatggtgcctgagacgccttacaaaccgatgacaagcggccaatcccgcgacccggatttccttgcctatggcttcgccaaacagcttgaacaagggccggtgcgctgggacctgatcatcaccctggccgagcccggcgacgtgaccactgacgccaccctgcgctggcctcaagggcggcggcagatcaatgccggcacgctgatcatcgacagccagcaatcccaggtcgaagggctgtgccgcgacgtggatttcaacccgctggagctgccggacggcatcgggccgtcggatgacccgttgctgatggcgcgtgaagccgcctatgccgaatcccaccggcggcgtatcgaagaagaaagtgcccattaagaatttttcccgtcacgcggaataaatcatttccctcgcctgttctatccccagaacaacttgaacgagggaagtacgatgggcctgcccaccgaagctcaaacactggatttcacggcgctggcccaaccttcgggcgaggctggcgcgtgtggccagaaccttgagtacgacccgcagtttctggagctggaagaggaagccctcggcaaacccgaggtgcagtacggcgacaccatcacccaggccatcgagccgaactggaaacgcgtgatggtcctcgctcagcccatgctggagcgcagccgcgacctgcgcctggccatctggctgacccgcgcccaactcaacctgaatggcatcgccggcctggccgccggtctcgaactggttcaggccttgctggaaaactgctgggacggcttgcaccctcagctcgatcccgacgacgacaacgacccgctgctgcgcatcaatattctggcgttcctctgtgaaccggccggcgtgctgcgtgatgtgctcgacgcgcccttgatcagtgctcgcaacttgggcgccgtcaccttgcgtcagttcgatctggccagcggcgagcaaagtggggagggcgaaaacgtcagcctggcgatgatcgaaggcgcgtttgccgaagccgacccgctggagctgacggccaccgacgccgcgctgacacgtgcgttggagctgagcgttcagatcgagcaactgctgaccgaaaaggtcggcgtaggtcgtgccatcgaccttagcggcctggccactttattgcgccgcgcgggtgaagtgattcgccgccgcctgcctggtgaggcccctgtcgaaatcgcggcggccgcgacgcccgtggcaaccgccgccgctgtcgccgccccgcaagccctgcgtggtgagatcaacagccgcgaagacgcgcgccagaccatcgatcgcctgtgcacctatttccagacatttgaacccgcaagcccggtgccgattctgctgcaacgggcgaagaaactgatcgacaagaatttcatggaattgctgcaagacctcgcccccgatggtctcgcgcaactggcgctggtcagcggtattcgcaacagcgacaactgaccctttttgtatcaaccccactcactggagcttttcctgtggccaaagaaagcagtcagaagttcatcgctcgcaaccgggcgccacgcgtgcagatcgaatacgacgtggaaatctacggcgcggaaaaaaccgtgcaattgcccttcgtcatgggcgtgttttcggacctttccggcaagcctgccgaaccgttgccgccggtggccgagcgcaagttcctggaagtcgatatcgataactttgacgagcgcctcaagtcgatgaaaccgcgcgtggcgttccaggtgcccaacaccctgaccggtgaaggcaacctgccggtggaaatcaccttccagtcgatggatgacttcaccccggcggccattgccagcaaggtgccgagccttaaccaactgctcatcgcccgcagccaattgtccaacctgctgacctacatggacggcaaggtcggcgccgaggaattgatcgccaaactgctggcggatccgaccgtgatgcaagccttgagctcggctcccaagccaaccgaataactgaataaccgctgccttcgccggcgcctcgtttgccccggtacggggacgctttgcccaaaatttgaggataccgtcatgtccacgacccaatctgaacagccagggcagcttgcccccgccacggatttcgacgccggcgacttcgccagcctgctgcaaaaagagttcaagcccaagaccgacaaggccaaagaggccgtcgaaacggcggtgcgcaccctggctgaacaggcgctgcacggcaccaacctgatgcccaacgacgtgctcggcaccatcgaaggtctcatcgctgcgcttgaccaaaagctcaccgagcaggtcaaccacatcctgcaccacgaggaattccagggcgtggaaagcgcctggcgcggcctgcattacctggtcaacaacaccgagaccgacgagaccctgaaaatccgcgtgatgaacatctccaagaacgaagtgcacaagacattgcgcaagttcaagggtgtggcctgggaccagagcccgattttcaagaagctgtatgaagaggaatacggccagttcggcggcgagccttacggcgcgttcgtggcggattactacttcaacaacagcgcgccggatgtggagctactgacccagatggcccgcgtcagtgctgcggctcactgcccgctgattaccgccgccgaccccagcgtgatgctgatggaatcgtggcaggaactggcgaacccacgtgacctgaccaagattttccagacccccgagcacgccgcttggcgcagcttccgcgccagtgaagactcgcgttacgtgggcctggccatgccgcgcttcctgtcccgtgcaccttacggcgccaagaccaacccggtggaagaattcgacttcgaagaaaccaccgacgctgccggtgccaaggatttcacctgggccaacgccgcgtacgccatggcggtgaacatcaaccgctcgttcaaacactacggctggtgctcgcagattcgcggcatcgaatccggtggtgtggtggaagggctgccggtgcataccttcccgaccgatgacggcggtgtcgacatgacctgcccaaccgaaatcgccatcagcgatcgccgtgaagcggagctggcgaagaatggcttcatgccgctggtgcacaagaaaaacagcgacctggctgcgtttatcggtgcgcaatcgatgcacaagccggccgagtacgacgacccggacgccaccgccaacgccaacctggccgcgcgcctgccgtacctgttcgccacctgccgtttcgcccattacttgaagtgcatcgtgcgcgacaagatcggctcgttcaaagagcgcgacgacatgcaggtgtggctcaacaactggatcggccgctacgtggaacacaacccggccacggccaccgacgccgacaaggcgcgcaagccgctggccggcgccgaagtggtggttgaagaaatcgaaggtaaccccggctattacggcgccaagttcttcctgcgcccgcactaccagctcgaaggcctgaccgtgtccctgcgcctggtctccaagctgccgtccaccaaatccaactgatcaacctgaaaggtaacgaccatgatcctgctgaacttcaaaggcacccaaatcaagggcacttccaccgtcgacgcgcacaaggactggatcaccatcgacgcgatccagatgggcgtcggccgcgccatctccatcagcggcggcggcaccgaccgcgacaccagcaacccgtcgttctcggaaatttccatgaccaaggccaccgacctggcctcggctgacctgttcatgcaagccgtgtgcggcaagagcctgggcgatgccgagatccacttcatccagaccggcggcccggacaagaagcaacaggtgttcctcaagctgatcctcggcgaagccatcatcagctcctactccgccagcagtaatggcgagcgcccgagcgaaaccttctccatcaacttcaccaccatcagctacgagtacgactccttcaccggcgacaccgtaatcaccggcacgccgaagaagtgggacctggaaaagaaccagaagatctgattctggctcggcctggtgcggcgggcggggcagttgtggcaaccgggttttctgtggcgagcgggcttgttgtggcgagcgggcttgccccgcgttgggctgcgcagcagccctcaaaacctgtgccgcgatctgtctgcaagtgcgcggtggccttattggggccgcttcgcagcccaacgcgggacaagcccgctcgccacaacagccccgatcaccacagaaagcccgctcgcagcaacatgatggagtactgattctatggctgagctcaccagtcgcgaacgcctgcaaccgtctttgctcgatcgcctgagcgacgacgacaccgaacatgccgtggaaccccgcgacaagcgtgtgttgtcgatgcgtggcctgcgcaaggcggtgttgcgtgacttgggctggctgctcaacagcaccagcctgggcagttttcgcgacctcagtgctcaccctctggccgggcaatcggtcatcaattttggtttgccggaccttgccggcaagaccgccgccggtttggaccgggaagagcttgcgcggcgcatccgccaggcgatctgggatttcgaaccgcggattttacgtgacagcgtgcgggtggtgccggtggcacccgccagcaatgccggcagccctaaccagatggcttttgaaattcatggcgaactctggggccaaccgttgcccgagcgcctgtacctgaagaccgaactcgacctggaagcaggcgaggcgagggtcttcgatatcgagacaagggatgtgcggtgaacgccaaactgctgcgctattacgaacgtgaactggcccacctgcgggaagtcggcggtgaattcgcccgcgactaccccaaggtcgccggtcgcctggggctggaaacctacgcctgcgccgacccttatgtcgagcggctgctggagggcttcagctttctggcggcgcgggtgcagctgaaaatcgacgccgaattcccgcgttttaccaaccacctgctggaattggtatacccgcaatacctggcgcccacgccgtcgatggccgtggtgcaattgcagccggacatgagcgaaggcagcctggctgccggtttcaaggtggcccgcggcaccgcactgcacagccagctcggcaagggcgaccagacggcctgcgaattccgcaccgcccatgacgtgaccctgtggccggttgagctggtcgaggcgcgctactttgcctgtggcgcgcaagtggcgggtgtcgacctgtcacgtctgggcgccgtgaaggcggcactgcggctgcgcttgcgcgtcggcgccggactgaccttcagtgacctgacgctggataatttgccgttgcatattcgcggcggcgaagccatgccctcgcgcatcctcgaacaactgctcgcccaggcggcgggtgtgttggtgatgccggtgcaggaacatgtggactggcaccagttcctgcccaaaagcgccattcgaagcctgggttacagcgacagcgaagccctgctgcccagcggcccgcgctcgttccagggctatcggttgctgcaggaatacttcgccatgccccagcgcttcctgttcgccgaagtcgcggggctggcgaacagcgtgagccgctgcgccgccgagcaactggacgtgatcgtgctgttcaagaagcttgatccggtgctggaacaaagcctcagcgcggccaacttcgggctgtactgcacgcccgcgatcaacctgttcccgatgcgcaccgagcgtgttcacctgtcggaccagcaatcggagtaccacgtgatccctgaccgcacgcggccgatggattacgagatctatcagattgaaggcgttaccggctacggcagcggtgccgaggccagccagacctttgagtcgttttaccgcgccaacgacctgcacgcgcgcacgccgcccaaagccttttatcaagtacgccgcgatgcgcgggtgctctccgaacaacagcggcgccagggcccgcgttccagctacattggcagcgagttgttcctgtcgctggtggacgcccaggaggccccgcaccgcagcgacttgcgccaactgggcatcgacaccctgtgcagtaaccgcgacctggtgttgagcatgccggtgggcagcggccgcaccgattttacggtcgagtccggcgcgccggtgcaatcggtgcgctgcgtggccgggcctaccgtgccggcgccgtcgtttgccgagggcgagacggcatggcgtttggtcagccatttgtccctcaattatctgtcgctgctggatcaagaccaggagcagggcgctaccgccttgcgtgacctgctgcgcctgtattgccgcatcgacgacgaggctgcgcataaacagattgaaggcctgcgttccgtcaccgccgagagcatcgtgcggcgcctgccgctgccggggcccatcacctacgggcgcggcctgcaaatcagtgtgaccctggatgagtcggcctttgaaggcgccggggtattcgtgctgggctcggtactggagcagttttttgccaagtacgtgtcgctcaattccttcaccgaaacggtgatcaaaagcacgacacgcggcgtgatcatgcaatggccggcgcgggtgggcagatgcgagatcctctgaccctgctgggcgagcttgaagcgcacccggggcgcttcgacttctatggcgcgttgcgccagctggagtgcgctttcccgcaactgccacgcatcggccaggccgcacgcccggccgatgaagccgtgcgatttggccagcaaccgtcactggccttcgaaccggcgatgattgctgcgctcaagcctggggtaacacccaagctgctgctgaatttctttggcctgatgggcgccaacggcccgctgccgattcacctcaccgaatacatccgcgaccgccagcgcaacctgaatgacccgaccctggcggcgttctgcgacgtgttccaccaccgcatgatcagcctgttctaccgcgcctgggccagtgcccagccggcggtgagcctggaccggccgggggcggaccgtttcgcccaatatctggggtcattgatcggcatcggtcagtcgtcgttgctcaaccgcaacgccgtgccggatgtggccaagctgcactttgccgggcgcctcgggccacagacgcgcaatgccgaaggtctggcggcgttgctcaccgactacctcggcgtgccggtcaaggttgagcagtttgtcggccactggatggcgttgcccgctgacggcctgtgcgcccttcgcagcggccccgacgctgccgtgctcggccagaccaccgtgatgggcaagaaggtctggaacacccagcacaaattccgcctgctgatcggccccctcgacctcgaacaaactcgccgcctgttacctggcggcgacagcctgcaacgcgtgcaggactgggtgcgccagtacgtcggcctggcgatggactgggacgtcaacctgatcgtcaaaaaagaacaattgcccggcctgcgcctgggttccgcgcccttgggctggaccagttggctgagcagcaaaacccctaaacacgatgatcggcaattgctgatcaaccctcgcatctcttctcaaggacctgcccatggctgacatcagtcgcgtcgcgcttttcggcaaactcaatagcctgtgctaccgggccatcgaaagcagtaccgtgttctgcaagatgcgcggcaacccctatgtggagctggtgcactggttgcagcagatcctgcaactgacggattcggacctgttgcggttgatccgtcattacggcatcgacccggcggtattggcccgtgacctgactgccgcgctcgaccgtttgccgcgtggctcgacgtcggtcaccgacctgtcttcgcaagtcgaagaagccgtcgaacgcgcctgggtctatgccaccctgatgctcggtgaatcccaagtgcgttccggccatttgctgttggcgctgctgaaaaccccgagcctgcgcaatggtttgtatggcgtgtcccgcgagttcaacaaggtcggcatcgatgacctgagcgaacagttcggcgcgctgctcaaggattcccccgaggcacagatgactgccagcgatggcttccaggtgcccggtgaagacgccggtgccctggctccggcggcgatgggcaagcaggaagccttgaagcgcttcaccgtcgacctcaccgaacaggcgcgcaacagcaagatggaccccatcgtgggccgtgatgaagagatccgtctggtcatcgacatcctgatgcgccgccgtcagaacaacccgattctggtgggtgaggccggcgtcggcaaaaccgccgtggtcgaaggtttcgcccagcgtatcgcccgcggtgacgtgccgccgagcctcaaagacgttcaattgctcgcgcttgatgtgggcctgttgcaagccggcgccagcatgaagggcgagttcgaacagcgcctgcgttcggtgattgatgaagtgcaggccagcgtcaaacccatcgtgctgtttatcgacgaaacccacaccctggtcggcgcgggcggtgcagcgggtaccggcgatgcggccaacctgctcaagccggcgctggcccgtggcaccttgcgcaccgtgggcgcgaccacctttgccgagtacaaaaagcacatcgaaaaagacccggcgctgacccggcgcttccagaccgtgcaggttgacgaacccgacgaagcccgcgccttgctgatgctgcgcggcattgccgaaaccatgcagaaccaccatcaggtgcacatccttgattccgcgctggaagcggcggtgcgcctgtcgaatcgctacatcccggcgcgccagttgccggacaaggcggtcagcctgatcgacaccgcctgcgcgcgcgttgccatcagcctgcacgccacgcctgccgaagtggacgacagccgtcggcgcatcgaggccctggaaaccgagctggcaatcatcgagcgcgaaacggccatcggtgtggaaaccgccagccgccgcgtatcggtcgaggccttgctggccaccgaacgtgagcgcctggacgacgtggaagggcgctgggacaacgaactggcgctggtggagcagatccagcgtttgcgcagccaactggcggactccagcgaccgcgaggccgggctggtggaactgcgccaattgcaggacgagctggtggcgcagcaaggcgaacacccactggtgctgatcagcgtcgatgaacaggccgtggcctcggtggtgcaggactggaccggtattccggtgggccgcatggtcaagaatgaaatcgaaaacgtgctgcgcctggccgaccgcctgggccaacgcatcattggccagaaccacgcactggagatgatcgcgcggcgcatccagacctcccgcgccggcctcgacaacccgggcaagccggtgggcgtgttcatgcttgcgggcacctctggcgtgggcaagaccgagaccgcgctggcgctggccgagtcgctgtatggcggcgagcagaacgtgatcaccatcaatatgagcgagtaccaggaagcccacaccgtttccactttgaaaggcgcgccacccggctacgtgggctatggcgagggcggcgtgctgaccgaagcggtgcggcgcaagccttacagcgtggtgcttttggatgaagtagagaaagcccacccggacgtgcacgagctgttcttccaggtgttcgacaagggctggatggaggacggcgaaggccggatcatcgacttcaagaacaccctgatcctgctcaccaccaacgctggcacccagttgatcagccgcctgtgccgcgacccgaagaccatgcccgcgccggacgacattgccaaggccctgcgcgagccgctgctggaagtgttcccgccagccttgctcggccgtctggtggtgatcccgtattacccgctcagcgacgccatgctcggcagcatcatccgcctgcaactggggcgtatcgaaaaacgcatcgccgacggccacaagattccattcacctacagcgacgaggtggtgcagttgatcgccagccgttgcacggagctggaaagcggcgggcggatgatcgacgcgatcctgaccaactcgatgctgccggcgatcagcaccgaatttctcaatcgcctgctgctgggcacgccggcgacccaggtgcaggtgggcgtcgagggcggcgagtttacctatgggttcgaggcgccctgaagccgtcacatcacgaggtcgctgaacccttcagtggaataaatccgctcgcctgactgttctgtccaggtgagcggactgatcgcgcgtagctcggacggcctggacagcattttccatttgccttgcaggtagaacaccaacgatggcgactcttcaacagcaccgcgaaatacaagtaaccagcgtgctcggcaccgatgcgctgctgtttcggcgcatgcaggccaccgaggggctgtcccggctcagcgaataccacctggagttgtacagcgagcgcgccgacctgaatatcgacgacctgctggccacccagatgaccgtggccgtagacctgcccaagggcggcagccgctatttcagcgggcatgtcagccacttttcgttcagcacgcggcaggggcggtactcaacctacaaggcggtattgcggccatggctgtggtttttgaccctggccagcgactgccggatcttccaggaactgagcgtgccggacatcctcaagcaggtgtttgcgccctacagcatcgccgatgtcgacacctcgggcctgagcggcagctacaagccattgacctactgcgtgcagtaccgcgagagcgatttcaatttcgtcagccgcctgatggaacaggagggcatctactactacttcaagagtgctgccgggcgccacaccctggtgctggccgactcctacggtgcgcactcgccggcgccgggttatgcccaggtgcgcttcatgcccgccgaagaccacgccatgcgcgaaagtgaagtgatctacgactggcgcatgggcggtgatgtggagccgggcggctacaccctgcaggatttcgacttcgaaaaacccacggccaacctgctggccaaatccaccctggccggcagctacccgcaatcgcggcatgaacgctacgactatccgggcaaatacaccgagcgcaaaagcggtgaaaactacgcgcgcaccttgattgaatccctgcacaccggtacccagcgggtcaccggtgccacccgagcgcgcggcctgtttccgggggctttgctgaccttgaccgaacacccgcgtagcgagcagaacgcgcagttcctgttgctggaagcgcgctacacattgtcgtccgatacctacgagccgacgccaccggccgagcctgcgccggtactgagttgcgagttcgttgcgctgtcgcgccagcagcaatttcgcgcgccgtgcgtgtcgcgcaaaccgctgatgcaaggcccgcagaccgccatggtggtgggcaagcagggcgaggaaatctggaccgacaagtacgggcgcatcaaggtgcagttccactgggaccgcgaaggcaagcgcgacgaaaacagctcgtgctggattcgtgttgctcagaactgggccggcaagcgctggggagcgttgtacacgccgcgcatcggccaggaagtggtggtcagttttcttgaaggcgatcccgaccagccgctggtgaccggcagcgtctacaacgccgacaccatgccgccgtattcgctgccggaaaatgccacgcgctcgaccatcaaaagcaattcgtccaagggcggtggcggctacaacgagctgcgtttcgaggacaaaaaaggctcggagcaggtgttcctgcacgcccagaaaaacctcgaccaacgcgtgctcaaggattctttggattgggtgggtggcgaccgccattccaaggtcgacaaagacctgcgcgagaaagtcggcggtgaccggcattcctcggtgggcggccaccgcaacgagaaagccaccggtgacgtgtcgatggcggcgggcgccaacatgatcatcaacggtggcatgaagaccggcattaccgccggcatggacacctacatcaagggcggcatgaacgtggtgatcgaagcgggggcgaccatcaccctgaaagtcggctcgacgtttctcaccctgaccccggccatgatcgtcgcctcgatcatcccactgccattgcccgaagcggcctcggcagcgcaagccctggccctgacggccgccaccggacctgccggcacgccgctgccgccaaaggacgccgacgatggcaagtaaccttttctggagcccgctatgaacctgatcctgctggttaaaagctaccgcgaccaaccgatgcccggcgacgtgatctgccgctttaccgaggtcggcggttccattggccgcgggccggacaatgacctgaccctggacgatccgggcaaatacatctcgcgggtgcatgcgcgcatcgagttgcgcggtgagcagttctttatcacagacaccggcagcaaccccagcctggttaatgaacggccgctgggtaatggccgcgagcgtgcgctggaggagggcgatcgcctggtgatcggcgactatgcgctggaggttcgcctggaacagcctgtggcaccggagccggaagacgacgcgctggccacgcgcatcctgccgccgctgtttgtgccaccgccaccgccggtggctgccgaattaccgccgctggaagtgccgcagccgctattgcgcgacccggaagtggtggtgccggtagttctgcacgacgacctggcgggtgcgcgcattctggaaggccactcgctgtttgacggcgcgatgccgctgtcggacccgttgggtttgaacccggcgctgacgccggtatttcgtggcaccgaaagcgaccacgtagcgccgcaactgcaggcgttcaacgcgccgatctggcaggccgagccgcaggtgattccggatgactacgacccgctccatgggctatccacccaacccgcagtcatcccggaaccaactgtgggagcgggcttacccgcgatggtggtctctgagattgaggtgattccggaaaaaatcattgtccctgaggccatcgcgggcaagcccgctcccacaccgaccgtgcccaacagtgatgacgcagtgttgaaggccctgctttcaggcctgggcctacccgacctccacacctcccgcacccccaccgaacttgcccagctggttggcgagatgctccgtgccgctaccggcggcaccatggatgtactcatggcccgcgcgctgaccaagcgcgaaagccacatcgacatgaccatgatcggcgcctattccaacaacccgctcaagttcttccccgacgccgacagcgcgctgacccagatgctcaatggggactcaccggcctatatgcgcccggtcaaagcgatgaatgcgtccttcgatgacctcaaggcccacgaactggcggtgatcgccggcatgcgcgcggcactcggcgcggtggtgcagcgctttgacccggcgcgggtcgagcagcgccgcaccacccacggcgcgctcgacaagtggatgccggcacggcgcaaggcgcgtttgtgggaccgcctggtggagcgctacgaagacctggcgcgcgatgccgatgaggatttgcagcggttgttcggggagctgttttccaaggcttatgaggagcaggtggcgcggatgaggcagtaaggggctgctgcgcagcccagcgggagcaagctccctcgccacagaaagcctcttgccacaactgtctgctcagtttgagagaagaatttatgtcctggaataacaaggtagtctggtccgaaggcatgctgttgcagcctcagcacctgcaacaacatgaccggtttttgcaaacccagctgcaagcgcgcgtcgcccccttgcgtgcctacggctggggcttttccaaattggaaatcgacccgcagcagttggcgatgggcaagttgtcgttgctgtcgtacagcggcatcttgcccgatggcacgccggtgggcctgccgtttgatgatgaaatgccgctgccgctggagatccccgacgacgcccgcgaccttaaagtggtgctggcattgccgagcctgcgcccgggcgtgtccgaggttgacgacaaccccagctttgaaaacttcgctcgccaccgcagtagtgaatacgaggcctgggacagcaatggcctggacagcagcgcgctgatgagcatcggcaaactgcgcctgcgcctggcctttgagggtgatgtggccgacacccacagcgtgctgggcatcgcctatgtggtggaaaaacgcgcggacaaaagcgtggtgctcgaccgcgaatactgcccgccgtgcctggatatccgcgccgccgaacgcctgcgcgccttcaacgatgaactgctgggcctggtgcagcaacgggtcgaagcgttggcgtcgcgtctgactcgccccgacggtagcggcgcggcggaaatcgccgactttctgttattgcaactgctcaaccgcagcctgccactggtacggcatttgtcggcgatgaccggcctgcaccccgagcagttgtaccgtgacctcgcctccctggccggcgagctggcgacctttactcgcgacgacaaacgcgccgccagctacccggtgtatcgccatgccgccttggcggaaacgttcgccccggtgatgctcgacctgcgccgcgcgctgtcggcggtgatggacgtgcgtgccatcgccattcccctggaagagcgccaatacgggattcgtgtggcggtgttgcccgaccaggaactgctgcgttcggccaccttcatcctcgcggtacaggcacaaatgtccgccgaaagcgtgcgcaacggcttcccgccgcaagtgaagatcggctcagtggagaagatccgcgacctggtcaacctgcaactgccaggcatcggtttgcgcccactgccggtggcaccgcggcagttgccgttccatgccggctttacctatttcgaactcgatcgcagcagcgaatattggcaattgctgagccagtcggccggttttgccatgcatatcgccggggtattcccggggctggaaatgcagttctgggccattcgaaactaaggcaaggtgactgacgtgaacgacactttcgatggcggccaggaccctgaccgcaccttgctgatccccacgcccggcgggcgtcgggccgggcctgccagtgcgcctgccgctgatgtgcagcgcgccgccctggtgctgcacggcaaggggctcaacccgctggtacgcgcggccaacccgttgctcgacctggtggtgccgttgcgcaccctgaccgcgatgccggatatggaaagcctgcgccagcgtttgattcaggcggtgcaggccttcgaagcccaggcccgcgccagccaggtggacgtggaaaccgtcgccgccgcgcgctacgcgttatgcacgctggtcgacgaaaccattgccagcacgccgtggggtgcaggcgtttggggcagccgcagcctgttggtgacgttccacaacgaagcgtggggcggcgagaaattcttcatgattttgcagcgtctgagccaggacctgcgcacccacatcgacgtcttggaattgatgtacctgtgcatggcgctggggctggaagggcgttatcgcgtgctggatcgtggcctcgatcagttgggcctgctgcgtgagcgcttgctgcaactgatcaaccaacaacgcggcaacccggagcaggacctgtcgccacgctggcgcggtgccgaggccccgcaggcatcgatgctgcgccgtgtgccgttgtgggttctggcgtcggtggcggcggtgttgctgttgagtgtgcagttgacctacagctggttgcttaaccgtgcatccgacccggtgtttgcccagctcggttcgatccgcgtggcctcgccactcaaggtggcggcgccggcggaaccggcgccggtacgcttgtcgggcttccttgcgcccgaagtcgcgcagggcctggtggtggtcaaggacagtgcagaccgctcggtgattacgttgcgcggcgacggtgtgtttgcgtccggcagtgccgaggtgtcgagcaactttgacggcttgctcgcgcgcattggcgatgccctggccaccgtgccgggggatgtggtggtggtcgggcataccgacaacgtgcggccgtcggcaacctcgcgattgggctccaacttcgacctgtcccaggcgcgggccaagaccgtggcgcggctgctggcgcagcgtgccgggcccgccgagcgctaccgcagcgagggccgtggcgaaaccgagccgctggtgcccaacgattcagcggccaatcgcgcacgtaaccgtcgcgtcgatatcaccgtgttgatcccttcccaggcgcaataaccatgaacttttcttcgtttttctcattgttatggtccccggtggagcgctttattctgtggctgctcaagccgtggttgctgtcactgatcggcgtggcgctgctgtcgttactggtgtggtacgaaggcccgttgctggcgttcaatggcagcgagccgctggcgccggagtctcggcgctgggggttgatcgcgctgtttgtgctgatctgggtgggctattttgcctggcgcctgtggcgtgcctggcgtgccaaccgtggcttgatggccggtgtggccgaggcgcccgtggtggcgcccggcgtgcgtgaaacccaggccgaagtcgccgagctgggcgagcgcatgcgctcggccatggccgtgctgcgcaaggccaaccccggctggaagatgagcgggcagtacctgtatcaactgccgtggtacatgtttgtcggtgcgccgggcagcggcaagaccaccgcattgacccactccggcctgcaatttcccctgcgtgaagccatgggcagcggcgccatcggcggcgtgggcggtacgcggcattgcgattggtggtttaccgatgaggccgtgttgctcgacaccgccgggcgttacaccacccaggacagctacactgaagtggaccgtgctgcctggggcggttttctcgacctgctgaaaaagtaccgccgccagcgcccggtcaacggcgtgattgtcgcgttgagcgtcagcgacctgctgcaacaaaccgaggcccagcgccaggctcaggccgtggccattcgcgcgcgcatcaacgagttgtatgagcgcctgggcctgcgctttcctgtgtacgtgatcatcaccaagtgcgatttgctcgcgggcttttcggagttctttgagaactttggccgcgatgagcgcgcgcaggtgtggggcgtgacgttcccgctggcacagccaccgcaagcggataccggccttgcgtcgttccccggcgaatttgatgcgctcgaacgccagctgcaacgtcgtgtgctggagcgcctgcagcaggagcgcgacctgtcgcgccgcgccttgctctacagcttcccgcagcaattcgccagcctgggtgacggcctgacgcggtttctgaataccgtgttcgaagccaaccgttatcaggaaccggccttgctgcgtggggtgtatttcaccagcggcacccaggaaggcagcccgattgatcgcgtgctgacctcgctggcggcgtcgttcggcctgggccgcaaggtgctggcgccgaatgtggctagcgggcgcagctacttcatcacacggttactgcgtgaggtgattttcaaggaggcggggctggctggggtcaatcatcaggaagagcggcgtcggcgtttgctggggcgggccgggcggatcacggcggcggcggtgttcgtgctgctgctggcggcgatgaccatcagctacaaccgcaacctgcaattgatcgccgatgcatcagccgctgcgaccaatgtcgcgcaactcgccaaggcgctgcctgctgaaggtgacgtgctggtgacgttgccgctgcttaacgctgcgcgcgccttgcccagcggctacagcgacgccgacaacagcgtgccgctgctcagccgcatgggcctgtatcagggcaacaagctgggggccggcgcggtgaccctgtatcgccgtctgctgcgcagtacgctgttgccgcatatcgtcgcgaacatggaaaacgccctgcgccgtggtgatgcgagcaatcaggagttcctctacgagaccttgcgcgcttacctgatgctcggcgagcggcagtacttcgacgccgcctcggtgcaggcctgggtcgatgtggattggcgccgcgaactgcctcaggccacgccggcgcagttgcagcaactgtcggaccacgtcgcggcactgctggaagccgacgacgaagccgaaccggtacaactggacagcgcgttgattgccaaggtgcgcctggcgctggcgagcatgccgctgtcccagcgtatttataaccgggtcaagcgccaggtggatcagcagcacctgccggagttgagcgtcaacagcgcggtggggcgggacgtgtcgtcgttgtttacccgtgccagtggtgagccgttgtcccgtggcgtcagcggcttgtaccgcatcgccggttaccgtgagttgaccgacaagaccccgcaggccgtggccgacatggccaaggacagctgggtgctggaccgccaggagtcggcacagattgccggcggcaacccggcgatgcaggcggcggtgctggagttgtattacgccgactacatccgccaatgggacacctttctggcggatgtgcacctgtcgccattgaccagcctggggcaggcggcccaggtgaccaatgcgctggcggctgccgactcgccgctgcgcgccttgctgcaggccgtctcaaaagaaaccacactggacggcgccctgacctcggccaccagtaaagacaccgaccagcgcgtgcgcgacaagatcgccgccgccactcagaaactgcaatcggccctgggcggcgacagcccggccccggtggcggatgcctcggccaacccggtcgaccagcactttgccgcgctgcatcgcttggtgggcaccggcaccgggccgcaaccgctggatgaagtcctggcgtccttgaaggatgccgggcagtttttcgacagcgccgacgccgcccgcaggagtgcggcgccagcgccgtccaatgaagtgctggggcgtttgaagcgttccggcgatgcacaaccggcgccgttgtcgtcgctgctgcgtgatgtggagtcgggcggcagcacgctgaccctgggcaacgagaaagcccgcttgaatgcactgtgggaagccaccggcgcgccgttctgccgggttgcgattgacgggcgttatccgctggtgcgcagttccggccgcgatgccactgccgatgacttcggcaagttcttcggcccgggcggtttgatggacgactttttcagcaagaacctcgcgccctatgtcgacatgagcggcaaccaatggcgttggcgttctacgggtgtgacgccgctgaatatttcccaggacgtgctcaaccagttccagcgtggtgccaagttgcgggacatgttcttcgtggccggcgcgcgccagccgtcgatgcgctttgacctgaagaccctgagtgccgacccggcgctgaccaaggtcaccctggacattgatggccagccggtggtgtacgacgccggtagcgtggcggacttcgcgggtatctccctgcccagcggcaaatctggcggcctggtgcgcctggacgccacgccggcgctggtcagcccgttgcgcagcgacggcccctgggggtggttgcgcatgatggacaaggcttcggtcagccctcagggcgaacagttgcaattgaccttcaatgtggagggccaccgggtggtctacctgttgcgcgcgagcagtgtcatcaacccgttccgccgtgatggttcagactctttccattgccccagcagcttttaaggacccgccatgaatggatttttcggcaaggtgatcagccatggggattttgtcagccggcgtttgccgtcgacgtttttggggccatgggatgaatggttacaggcaggcttgcagtgcagtcatgagcgtctgggtgagcaatggctggaggtctatttgtgtagcccggtctggcgttttgcgttggccgcaggtgtgtgcggcgagcagggctgggcgggggtgatgatccccagcctggatcgggtggggcgttactttccgctgactctcgccactgcgggggaggatgcgccgttgctggcgcggctggagcgcgatgtgccctggtacggccagttggaacggctggcgttgtcggcgctgagcaaggggttttccctggaggcgttcgacgaggcgctgttggcgctgccattgcccggatgttggaccccgccgagttactcggccggccttgccgcccctgcgcgctggcttgatttgcctgaccccgagcgtatcggtgacggcatgccgcaattgaatgcgcagattgatgcgcggggactcgccgggcattcgctgttctggaccgaaggctcgccgcgtgtggcgccgtcgatcctggtgggggaagggttgcccgacggggcgacctttgccgaaatgctcggcgggcgatgatgccccatgaaaaagtcccgaacctgtcggggttttcgcactgagtggcttgttgtggtgtgtgggcttgctgtggcaagcccacacaccacagcaagcccattcaccactcggccgttggttttcagctcaagactgccagttgcgcaacagtctccggaaaccgcgccaccagacggatcagggtgacggcctgcgcattgggcttggcccggccttgctcccagttttccagggtgcgcgtattggtgcgcaggtacatggcgaacaccgaccgggagaggttgagttgctggcgcaccgcaaccacttcttcggcggtgagcggttccagcttgttgaggtgaaccttgtgggtgcgcagggtgattttgccttggcgttcgtcggccagggcgtcgaagccttcgaccagctcggaaaaaatttcacgtttcatgatgtgttctcgctttgatttccttgtccagcatctgtttaagcgcttttttgtggtggggtgccaggtcgtcctgttcgtgtttgccgtacagggtgaacaaccagaattgcgtgccgcccgaccaccagtagtaaatgacccgcaggccaccgcgcttgcctttgttgcgtcgttcatcgacgaaacgaacctttcgtaggccgcctgttccttcaatcacatcgcctgcttccgggtttttcatcaattcctgttgaaacccgtggaacagctcgtcactcagataatccttgcgatgccgctcgaaggccggcagttcgataaatagagcgtccatgttctgtacgtagtctgcgtatagtttgctggcccacgcacctcgggtcaagtgaccgggttgtgggaactttcctaaaacgcagccaccatacggcggccttcaacgggtgaatgccagacgaggaggtggggaggagaggaattttctgcgatgggggaaagtaaaagaacgagcgtgacctgaaccctgttgatcgacagggttcagccctgagaagtggatcagtaggcggcgatcaacccatctttacgcgggtcagttccccccacataaccatgccgggtgcgctggataatctgcgcgccaccaaaggcgaacacgccattggggtcttcaaagtcgatggcgtggcctttgtcgcgcagtgcctgcgccacgtgctgatcgaatgcgcgttccaccgccacctgcaacccagcctcaatccgccagcgcggcgcattggcggcggcctgcgggttctgcttgtagcgcaggatgcgcatcatcatctgcaaatgcccttgcgcctgcatcgggccacccatcaagccgaatgccatcaacggcgtaccgtcggcattcatcacaaagcctggaatgatggtgtgaaagggccgcttgcacggcgcgaccgcgttcacatgttcggggtccagggtaaacgccgccccgcggttttgcaggctgataccggtgcccggcaccaccacgcccgaaccgaagcccatgtaattggactgtatgaacgacaccatcatgccgttttcgtcggccgccgataaacacacggtgccgccggctttgggtgcgccgtggcctggatcagcggcgtgctcattgacctgcgcggcacgttcgcgcaagtacgcgggatcgagcaagcgctggggggcgaggcgcatatggtcgctgtctgtgacgtaatgctgaagatcggccagcgccagcttcatcgcttccagcaccgggtgcagcgtctcggggctgtctactggatgctcaccgacaccgagtgcctcaagcatcgtcagccccgccagtgtggcgatgccttggccattgggcggcagttcatggacgacggcgccggcgtagggcaccgagagggtttcggtccagtcgacgtggtgattcgccaggtcatcaaggctcatcacgctgccgttggccttggcatgggcgatgatggcgtgcgccagctcgccgcggtagaacgactcgcccttggtgtcggcgatgcttttgagggtttttgcgtgatccttcagccggattttttcaccggcagtgggcgctttgcctccgggcaaaaagcactcggcgaaacccggttgatccttcagtttctcggcgcccaggcgccacaactcggcaatgatgggcgtgacctgataaccgttttgcgcatggctgatcgcaggttcagccagtgtggcaaagggcaatttgccgtagcgctcggacagtgcgacccaggccgacaccgcccccggcacggtcaccgagccccagccgcgctggggcatttgcgcctcgcccgcaaaatgctcagccgtccagccttgcggcgaacggccggaagcgttcagaccctgcagctgtttgccgtcccagacaatggcaaacgcatcgctgccgatgccgcaaccggtgggctcgaccaccgttagcaccatggcggcggcgatggcggcgtcgaccgcgttgccgcccttgcgcagcatctccagcccggcctgcgcagccagtggctgggagcaggcgaccatgttgttgcccatcacgggtgagcgtgcggacgggtagggttggctgtaatccagatcatcaaacatgcgtggttctctttgggcagtggttaatgtttggggtccagggcgtcacgtaaaccgtcccccaacaggttgaaacacaggacggtgatgtagatcgccacaccgggtgcgatcgacatccagggcgcctgctccataaaatttttggcggtattgagcatcgaaccccaggacggcgagggcggttgctggcccaggccgaggaacgacaagctggcttcggcgaggatggccgacgcgatggtcagcgtggcctgcaccaccagcggcgacattacgttgggcagtacgtagcgcaggatgatccagcggtccggcaggccaatggcacgggcaccttccaggtaatcctcgtgacggatggccaacacctggccgcgtgtcaggcgcgaaaaaatcggcatcgccgagagcccgatggcaatcatcgcgttggtcaggcttgggccgagaaaggcgcccaaggcgatggccaacaccaggaacggacaggacagcaacgcgtccacaacccgggaaatcatcgcgtccagcttgccgccgaagtagccggcgatcagccccagcggcacgccgatggccatggcgattgccaccgagacaccgcccgccaccagcgagctgcgcgcgccccacagcaagcgcgagaacaggtcgcggccgagttcgtcggtgcccagccaatacagcatcgacggcgccttgcgcaccgcgaggaagttggctttgagcgggtcatacggcgcaatccacggggcgagcagggcggcggcgatgaacaccagcagcaccgtcgcgccgatcactgcgcccttgttggcgaggaatttgtgcacaaacggcgaacgagtgcgtggtttcaagacgcggtcactgatgggcgcagcagctgaaacgatagcggtcatcaagccgtcctcaagcgtgggttgatcaggcgatagagcacgtcggccagcaggttcaacagcaggaagccgatggcgacgcacagcaccacgccttgcaccacgtcgtagtcgcggttgaacacggcatcgacgatcatcttgccgaagccgggaatgctgaagacctgctcggtcagtaccgcaccgcccagcaactcgccaaacaacagcgtggtgagggtgacgatgggcatcagcgcattgcgcagggcgtgtttgagaatcaccgtgcgcgggaacaaccctttggcccgggccgtgcgcacatagtcggcgcgcagcacttcgagcatggcgctgcgggtatggcgcatcagcacgccggacaacccggcgccgagcacgaaggccggcaggatcagggttttcaggttttgcagcacgtcttcactcagtggcacaaagcccgacgccggcagccattgcagcttcaccgcgaagatcatgatcagcaaaagccccagccagaagtgcggaatcgagatcccggacaacgcgacgatattggccccatagtccacggcggtgcctttgcgcaccgcagaaattaccccggcggggatgccgatcagcagcgcgatgaccagcgccagcaccgatagctcaatcgtcaccggcagcttggaggccaccagtgtggtcaccggctgttcggtgcgcagcgaggtaccgaagtcaccttgcagcacgttgccgacccaatgaatgtattgcagcggcagcgggtcgttgaggcgatatttttcccgcaggtactccatcaccgcagggtcacgctcttcaccggccatggcgagcaccggatctcccggcagcagtttttgcagggtgaacacgaacagcgagaccagaaccagcgtggggatggcgctgagcaggcgcctgacgatatagatcagcatgacgaaccctcaaagagtatcggggtgtgcaaacgcattacttgatgacgacgttttccagacggatcagcccgtccgggttcggcacgaaaccactgatgtcggcgcgcatggcgatgattcgcgggtcgaaatacaggtagctggtgggcacgtcatcggcgattaggcgcagcgcctcgaagtacagcgcctggcgctgcgcctggtcgttgaccgtgcgggccttgtcgagcaatgcgtcgagtttcgggtcacagaagtggccgtcgttctggccgcccttgcaggcgacgaactgatagatgtcgccgtccgggtccgggcggcccgaccaggcgctcatgccgacctggaagttccccgactgttgttcgctgagcagcgtggcgtactcggtggcgaccagattgaccttgaacccggcttcgtcggccatcgcctggatgatctggccaacctgctgcgcaatggggttgttggcgactttcagctcgactgccagcggcagtttgacgccggcctcggccagcaactttttgctttgctccacatcgcgcggcggaatcggcaggctcttgtcgtaatacgggctgctcatggggaagggctgggcgccgggggcatacaggccttcgaagaccacctggttgatcgcatcgcggtcaatcgccagttcaaaagctttgcgcacacgcttgtcctggcccattggggttttggaacgctcgccattgcctgtgttgtacatcagctgcatatagcccaggcccggggtgttgaaaacttgcagcttgctgtcggccttggcggttttcacgtcggtgggggccacgcgctcgatcatctgcaggtcgccggagcgcaggttggccaggcgcaccgaagtatcggggatgggcaggaaaatcactttgtcgaagtggtaggcctgcttgttccaatagttgtcgaaacgctccagcacgatgcggtcctgctgcacgcgctggacgaacttgtagggccctgagcagatcggtttggcgccgacctcagtcgccgaggctttgggcgccagcatcatccccgcgcggtccgacagttgcgagatcaacgtggcatcgggctgcttgaccttgatcgccaccgtgcgggcatcgatcacctcgacgctgtccaccgacgacaattcgctcttgcgcagtgagtcgggcagggtacgggcgcggtcgaggttgaacttcacggcggcggcatcgaaggtttccccgtcttggaaggtcacgccgtcacgcagggtcatggtcagggtcttgttgtcttcactccaactccacgctgtggccaattgcgggacgtattctagatgcgggttgatgtccaccagcttgtcgcacagtgcggtgtagaccagccggcttgaataggtgcgcgagcgatgcgggtccagcacgtccgggtcatcctggatgccgatgcgcagcgtcgactcggcaacggcagcattggccgcgagcagtaacagcgttcccgtcacgagttgggcgaacttcatggctgactctccagagatagggcttgatggcttttgaacaggctcaggcggcgggtgtaggccgcgctgggggtgggaaccgtcagcgaacctgcaccggcgctggcgatttcgtgccagtaatggcaggcgacctggcgctcggcgtcgacgttttcaaacaccggcttgacgtcacggcacagggctttggcgtgggggcagcgcgtgtgaaagcggcagccggacggcggcttgctggggctgggcatatcgcctcccagcacttggcgcgggtggcgcaagccggggtggctgaccggcacggcggcgaccagggcttgggtgtaagggtgcagtggcgtttcgaacagcgcgcccaccggcgccagctcgacgatctcgcccaggtacatcacggccacgcggtcactcatgtggcggatcacggcaaggccgtgggccacgattaccagggtcaggccgaattgatgcttgaggtcttccagcaggttgaccacttgggcctgcaccgacacgtcaagcgccgagaccggttcatcaccgaggatcaagcgcggttcagaggccagcgcccgtgcgatgccaatgcgctggcgctgcccaccggaaaactcgtggggaaaacgccggccatgttcgggggccaggccgacggtgcgcagcagctcggcgaccttgtcctggcgtgcgctgcggctgttgtcggtgtgcagccagatcggctcgccgatgatcgattccacattcatgcgcgggttcagcgaggcgaacgggtcttgaaagatgatttgcagatcacggcgcgcctggcgcaactgttccggtgccaggctggcgaggttgtggccttcgtagatgacctcacccgccgtggggttgagcaggttcagcagcaggcggccgagggtggatttgcctgagccggattcgcctaccaatgccagggtttcgccccggcgtaccgccagtgacacgtggttgaccgcctgcaccggcggctttttgcgctggaacagcccggtttcactgctgaaatgtttgctgactgcgatgctttgcaggatcggttgctctgcgctcgggtcgagattgtgttcgagtggcttcatgcggtctctcccaagtgctgctccagtggcacgcgcaggcaggccgcgaaatgcccgctcgatacttccagcaacggtgggcgcgcttcgcgacaggcggccaggacaaaggggcaacgcccggcgaatcggcaaccgcctggcatctcggcgggcgtcggcacgcgcccgctgatggttgccagccggccctcgcgcgggcccatggagggcatcgaacctatcaggccgatggtgtaagggtgctgcgggtcatcaaacaaggcgttgaccgggccgctttccaccacttgcccggcgtacatcaccatcacgtcgtcggcgacttcggccactacacccaagtcgtgggtgatgaggatcatcgacgtgcccgtttcagcttgcagggcgctgaccaacgcgaggatttgcgcttggatggtcacgtccagcgcggtggtgggttcgtcggcgatgatcagtttcgggtcgttggccagggccatggcgatcatcgcccgctggcgcatgccgcctgacagttcatgggggtaggcatccaggcgttgcgcggcgtcgggcacgcggactttctccagcatctgtagcgcgcgttgcctggcttctttctgggacagcccttgatggcgtactacgctctcggcgatctgttcaccaatggtgaataccgggttgagcgaggtcatcggctcttgaaagatcatcgccatgtgattgccgcgtacgtccagcaagcgctcgtcggccatctgcagcaaggcttcgcccagcaggcttgaggcggtggcttgaaccgttgcggtgtcgggcagcaggcccatcagcgccatcgacgtcacgcttttgccacagcccgattcgccgacgatggccagggtttttccggcctgcaccgcgaacgacacgccgtcgaccacgttggccgaggcgcctttgaagcgcacgctcaggttgtcgatgctcagcaccggaggaaggtcgggtttcataggctggcctccaagtcttgctggatcacggcttccagggcctgttgcagggcgcgcaggtgaccacgcatggcggttgccgccttgaccgggtcgcggctctcgatggcgctgacaatgtcgtcatggtcgtggctgtacatttcgaggcgctcgttgctgcgcgccctgtgccgcaggtcgcgccagaccggatcgaggcggatggcatcgagcatttcgaacaggtccagcatcaagcggttgccggaggcttcggcgatggcgcggtgcagggcgctgtcccagagctcgatggattcggcgtcggtttcatccaccccttgctggaaactggtgcgctcgaccaggcggcgcaggatcgccatttgctcaccgctggcgcggacggcggcaagggaggcgagcgcgggctccaggtacaggcgggcttccatgacctcgctgaaattggttcggctggcgactttggcaaacgtcatgctggcgctcggcggcgtcgggccgacataggtcccttttccctggcgacgccagatgcgtccttcggcttcgagcacagcgagcgcatgccggattgcccggcggctggcaccgaattcggcggccagttcgcgctcggtcggcagtgcccgctggggtgtcgaggcatgctgggcgaccatctggcgtagcacgtccagcgccattttcgaagacttgttgggggatgcttcggtctcgaacctttccataatggtttctcgtgacgggccaaaaagcgggagcaggggtggggcgaacccgcgatctgcgatgggagggtgattgcaagcgtgatgccaattgcaattggttcgctggcagggtaatccgcttttgctgggggatgggcgtgtggcagtgggtgtatgggcggatcggtgtgaggcgttggaggcgaatgtgattggttcggcgctatctgaaccaattttttggagaggggggtatctgtgtgcacaaatgtaacgtgcgcctctttagcgtgcgttctgctgggctgcctggcgtgcaatgtggaagctggcttgcctgcgatgacgccctgccagccaacctgtatctggctgatgcccacggtccaactgtgggagcgggcttgctcgcgaatgcggtggatcagtcacttaatttatcaactgacacactgcattcgcgagcaagcccgctcccacatttctgatcgagtaagacttcaatatctgcacagatctgcttttctgtgggagctggcttgcctgcgatgcagacacctcggtacatcagtcacaccgagttgatgccatcgcaggcaagccagctcccacaaaagccagattccacatcagaccgcttttgcttcacaccactccagccactaccccaacaacggatatgcactcagcaaaccatccccccaaaatgcaaaaacggcgcccaaaggcgccgttctgtctactgcatctgcttaagcgatcaaacgcccagcaccgcatgctgcaccagggtgagcaacggctgagggtaaacgcccaggaagaacgcgagcaaggcgatggccagcagcatcacgccacctgccttctgttcccaatgcagctcggcatccacacggcgcaggtttggctcgatcaggtacagggtgaccatcacgcgcaggtagtagaacacgccgatggcgctgcccagcacgagggaggcaaccaaccaccactcgtgggcttcaacaccggtagccacgatgtagaacttgccgatgaaacctgcggtcagcgggataccggccagagacagcatcatcacggtcagcacggcggtcaggtacggacggcgccagaacaggccgcggtattcgtacagggcgtcggcgtcacggcctttgaacggcgaggacatcagcgtgatcacgccaaatgcacccaggctggtgatcacgtaggtgaccaggtacacgcccatggcttccacggccaggcctttgctcgccaccagggcgatcagcaggtagccgaagtgcgcgatggaggagtaacccagcagacgcttgaggttgttctgggtcagggccagcaggttaccgaacaggatcgacgcaatggcgatcacggtcagcacggtgctcagcacgccggtgttggcagccggggagatctggaacagacgcaccatcaccgcaaacactgcaaccttggacgccgtagccaggaacgcagcgactggcgccggggcgccttcgtacacatccggggtccacaggtggaacggcaccagggagagcttgaacgccaggccgatcaacatcatggccaggcccagttgggcaatcggcgcaggcatgtgagtggtggccagggcgtgaccgataccggtgaagctcaggctgccggcttcggcgtagagcagggccataccgaacaacaggaacgcggaaccggcggccgacagcaccatgtacttgatgccggcttccagggagcgcttgttgaagaaggcgtaagccaccaagccgtaagtcgggatcgacaacagttccaggccgatgaacaggccggccaggtgctgtgcgctgaccagcacgatgccaccggccgcagccagcaggatcagcaggtacagctcttccttgttgcctgggtagccggtgccgccttcgcccatgtaggcgtgggcgagggtaacgcaggccagggtcgcgaccaggatcagcgcgatgtacagcagggcgaagtcatcgaccatcatcaatggcgtaaccgccaggggcgcgaccttgagggccgggatgatcgacagcagggccaggttcagaccggcacaggacagcaggaacgtttgcgagtgattgcggcgccaggcgattgccagcatcaccaccacgatggtgaggctggtaatcagcagcggcgcaagcgcgataaagtgttggatcgtgaattccatagcgctcttaccgggccgaagcgagttgagagaaggcggtgccgaaccactgctgcacgccatgcatcgttgcggcagaagtgtccaggaacggttgcgggtacacgccgatgtagatcagcagtaccgcaaggccgagcaccatgatcagttcgcgagcatccatcccttgcaggacggtgtcggacttggccgggccgaagtaggcgcggtggatcatgatcaacgagtaaaccgaaccgaacaccaggccggaggtagcaatcgcactgatccacggcgtctgcacgaacgagcccatcaggatcaggaactcgccgatgaagttaccggtacccggcaagcccagggacgcggcagcgaagaacaggctgatcgccggcaggtaagcgatgcgcgaccacacgccacccatttcacgcatgtcacgggtatgcaggcgctcgtacagctggccgctcaggataaagagggcagcggccgaaacaccgtgggccaacatctggatcgctgcgccttgcagcgccagttggctgccggagtagatgccgatcagtacgaagcccatgtgggaaacggacgagaaggcaatcagacgcttgatgtcggtttgcgcgaaggccaggaacgcaccgtagaagatcccgatcagacccagggtcatggcgatcggcgcgaactcggccgaggcattcgggaacagcggcagggcgaaacgcagcagaccataagcagcggtcttcaacagaataccggccaggtccacggaacctgcggtcggcgcctgggcgtgagcgtcaggcagccaggagtggaacggcaccaccggcagcttcaccgcgaacgcgatgaagaagcccagcatcaggatgtactcggtggtcagggacatcttggttttcaacaggtcggcgtagttgaaggtgatcacgccggtgttgttgaagttgaccagtaccaggcccaggatcgccaccaacatgatcaggccggaagcctgggtgaagatgaagaacttggtcgccgcgtagatccgggttttcttgccgtccgaagagctgtgaccccagagcgcgatgaggaagtacatcggcaccagcatcatttcccagaagaagaagaacatgaacaggtcgagggcgaggaacacgccgacaacgccgcccaggatccacatcaggttcaggtggaagaagcccacgtgacgctggatctctttccaggagcagagtaccgagaggatacccagcaggccggtcagcaggatcatcaacagcgacaggccgtcgagggccaggtgcacgttgatgccgaagcgctggatccacacgtgcttgaattcaagcgcgaaggtcggatcggcacccggtgccggagcaaatgaatagtcgccatgggcccacagccagaggccgagtgcgagttccagggacatggtcagcaacgcaatccagcgggggagggtggcgccgaagcgttcacccatccagcagagcaggccgccgataaaggggatcaggattagccagggcagaatcatgacaggctcgtttcctttcgcaagttcgcaaagttggcaaagttcatagtcagaccgctaccacgacgatggcgccgatcaccagtacggcaccggcagccatggaagcggcataccaacgcagttgaccggtctcgctgcggctcagggcggtgtgaccggccttggcggcgcgcgggatcaaaccgatggtctggtcgagcgggtctttgcgcagtacatggctgatggccaggtaaggcttgacgaacagtttgtcgtagatccagtcgaagccccaggcagcgaaccaccaggccgacaggaagcggccaatgccactgttggcaaccgcggtcacgaatcgacgcttgcccaggaacaacagggccgccagcaggataccggcgatggcgatggcgcccgaggcgatttccaggctgtgcttggcagcgccaccggcatggccggcgctttctggcaatacaccggccagtggcggtgtgatcagggcgccgacgaaggtcgacagcacgatcagtaccgacaaaggcaaccagtgcgaaatgccgtggcctgcgtgtgcttcggtcttggcttcaccgtggaaggtgatgaagatcaggcggaaggtgtacagcgaggtcatgaacgcaccgaccaggcctgcgtacagcaggttctggttaccgctggcaaaagcttcccagaggatttcatccttcgagtagaaaccagcggtcaccagcggcagggcggccagggcggcaccaccgacgatgaagctggcgtaggccagtggcagtttcttccacaggccgcccatcttgaagatgttctgctcgtggtggcaggcaacgatcacagcaccggaagcgaggaacaacagggccttgaagaaggcgtgggtcatcaggtggaagatcgccgcgtcccaggcgccaacgcccagggccaggaacatgtagccgatctggctcatggtcgagtaggcgaggatacgcttgatgtcggtctgcaccagcgcggcgaagccggccagtaccagggtcacgccaccgacgatgcccaccaggtgcaggatttccggcgccagggtgaacaggccgtgggtacgtgcgatcaggtagacacccgccgttaccatcgttgccgcgtgaatcagtgcggaaacaggggtaggaccggccatcgcatccgccagccaggtttgcagcggcagttgcgcggatttacccacagcaccacccagcaacatcagggtagcgagggtgatccagaagtcgccgacctggaatttctgcggtgccagcaccagcagttcctggatgttcagcgtgcccacctgttggaacaggatgaacaggccgatggccatgaacacgtcaccgatacgggtcacgataaaggctttgagggctgcgttaccgttgttgcggttgctgtagtagaaaccgatcaacaggtacgagcacaggcccacgccttcccaaccgaagtacaggaacaacaggttatcgccgagcaccaggaacagcatgctggcgataaacaggttggtgtacgagaagaagcgcgagtaaccggcttcaccgcgcatgtaccaggacgcgaacaggtggatcagaaagcccacacccaccaccacgccgagcatggtgatcgacaggccgtcgatgtagatagcgaagttgggcttgaagccctccaccgacatccactgccacagcaccagggtgtagtggccgccttccggcggggccacgttgaattgccagatgacgtaggcagccacgatggccgacaggccaatggaacccacgcccaccagggcggagaggttttccgaccagcgcccgcgagagaacgacagcagcaggaaaccgatcagggggaatacgaaagtcagaaagatcatgttcatccgcgcatctcactggcagcgtcgatatcaagcgtgtggaagcgacgatacagttgcagcaggatcgccaggccgatactggcctcggcggctgccaggctgatcaccaggatgaacatgacttgtccatccggctggccccaacgtgcacccgcaacgatgaaggccagtgcagcggcgttcatcatgatttccaggctcatcaacacgaacagaatgttacggcggaccatcaggccgaccaggccaaggcagaacaggatgccggcgaccgccagaccatgctccaaagggatagcaggcatcgtcattgctccttggcttcgttgcggcccaagtggaaggcggtgatggctgccgcgagcagcagcatcgaagccagttcgaccaccagcaggtacgggccaaacaggctgatgcccacggccttcgcgtctacggtggtgtggccgatggcctggccgctctggtgagcgaacagcacatacagcagttcacccagcagcagggctgccagcacaaccgggccgagccagatgccgggtttgagccagacgcgttcctgggcgaccgaagccggccccaggttgagcatcatcaccacaaacacgaacagcaccatgatggcgccggcataggcgatcacttccagcacgccggcgaacggggcgccgagtgcgaagaaggtcatggccacggcgatcaacgaaatgatcaggtagagcagggcgtgcacaggattggtgttggtgatcacgcgaagcgtggacaccactgcaataccggacgcgaaatagaaagcgaattccatctttcttccttaaggcagcaagctcttcacgttgatcggctcggcttcgttttgtgcggcgccttttggcttaccggcaacggccatacctgcaacacgatagaagttgtaatcagggtttttaccgggaccagagatcagcagatcttctttctcgtacaccaggtcctgacgtttgaactcggccatctcgaaatccggcgtgagctggatagcggtggtcgggcaagcttcctcgcagaggccgcagaaaatgcaacgcgagaagttgatgcggaagaagtccgggtaccagcgaccgtcttcggtttcagctttctgcagggagatgcaacccaccgggcacgccacggcgcacaggttgcaggctacgcaacgctcttcgccatcggggtcgcgggtgagcacgatgcggccgcgatagcgcggcggcaggtacaccgcttcttccggatattgcagggtgtcgcgcttgcgaaagccgtggccgaaaaccatcaccaggcttcgcaactgggtaccggtacccttaacgatgtcgccaatatatttgaacatgggtcaaatcctcactgaaccgcggctgctggcgtgttcaacaacacgacggcggccgtcaccagcaaattgatcagggtcagcggcaggcagaatctccagctgaaatccatcacctggtcatagcgtgggcgcggaatcgaggcgcgcagcaggatgaacagcatgatgaagaacgcggtcttgaggaagaaccagaagaacgccaactgcggcaggatgccgaacggaccgtgccagccgccgaagaacagcgtgaccagcagggccgagatcaagatgatgccgatgtactcaccgacgaagaacatgccccatttcatgccggcgtattcaatgtggtagccgtcggccagttcctgttccgcttccggctggtcgaacgggtgacggtgagtcacggcgacgccagcgatgaagaacgtacagaagccgaagaactgcggaatgatgaaccacaggttctgcgcctggtactcgacgatgtcgcgcatgttgaacgagccgacctgcaccacgatgcccatcagcgcgaggcccatgaacacttcgtaggacacggtctgggccgaggcccgcaagctgcccagcagggcaaacttgttgttgctcgaccagccggcgaacagcaccgcgtagaccgacaaaccggccatggcgaagaagaacagcaagccgatgttcaggtccgccacgccccaggtcggggtgatcgggatgatcgcgaaggcgatcagcaaggcgctcatggccacgaccggtgccagggtgaagatcaccttgtcggcaaacggcggggtccagtcttccttgaagaacattttcagcatgtcggccgcgatctggaacataccaaacgggccaacgcggttaggaccgtaacggtcctgccaccagcccagcaggcgacgttcgacgaagctgagcagggcgcccgcgacgaccacggccaacaggatcacgatggccttgaggaccgcaatgatcacgtcgatcacttcaggggtgaaccaggtcattgcgctgcctcctgcagaccgtcaacggttttgccaaagatggccgctgggatgccggcgaaaccttttggcagtgcgaccaggccagcgcccaattcttcgttgatgcgcagcggcagacgcagggtctggccggccacgttcaggctgagcagggcaccgtcgttgacgcccaggcggtcggcttcggacttggccagggccacgtaggcttctggaatacgctcttgcactggcgcggctttggaagaggtctcttcgctgccgaacaggtggaagaacggcacaacctgccaggtgccctgggccgggttgaacggacgcggtacggcggcgaaccagttcagcgcgtcaccgctgctttcgatcaggcgggtgcccgggtcgccagcgcggatgtgaccaccgacttcgtcctggaacttgttccaggcctgtggcgagttccagcccggcgaccaggcgaacggcacctgctgacgcggctcgaccgaacccgagtaaccttccatggagaaggcaaacgcggtgtcctggtcttgtggagtacgcggttcgtgcacgctgatattggcgcgcatggcggtacgaccggagtagcgcagcggttcacgggccagcttcatgcccttgatgcggaacgcggcggatggtgcagcgtcgacgatacgggccagctgcggcgcgctggcagcggcggcggcggtcacgtggtcgagctgggtccagtcgatcggctggttcagcagggtggcgcgcagggcatgcagccagcgccagccttcgtgaaccaggatgctggcatccatgtacttcggatcgaacacctggaagaagcgctgggcgcggccttcctggctgaccagggtaccgtcgccttcggcgaaggtggcggctggcagcaccaggtcggcacgctcgctggtggcggtcttctggtggtcggcaacgatcagcaccttggtggcgttgagcgcagcgtcaaccttggcggcatcggtgcgagtgtacaggtcgttttccagcaccacgatggcgtcggcattgccatccgttacggcttgcagcgcggcgtccagggactcgccaccgagcatggccaggccaaggctgttggcttccggcacgaccaggctgatggaaccgttcttgtcgcgcagcttcaaggccttggcgatgttggcagcggcttcgatcagcgccttggaacccaacgaggtgccggcaatgatcaatgggcgcttggccgcgagcagggcgtcggcgatgcgctgggccagttcaacggcttcagcgtccaggccttcgacggcaggcgcgctggcgtccagtgcgtgggctacggcgaaaccgatgcgggccaggtcgtctggcgcggcgtgtacgcattcttcagcgatgtcgtcgagcttggtttcagccaggctggcgataaacagtgggttcagcgcgtgctggccgatgtttttcacggcagcgtcgagccacggctgtacgcgcatcgcgtcggccatgtcctcggccttgcccttgaccgactggcgcagcgacagcgcgatgcgcgcggcggtctgggtcaggtcttcaccgagcacgaagatggcgtcgtgatcttcgatgtcgcgcatgttcggaaccggcagcgggctgtcgttcagcacttgcaggaccaggcgaatacgctccagctcagcggcttcgataccggagtagaagtgctcggcgcccaccagttcacgcaacgcgtagttgctttcgaggctggcgcggggcgaaccgataccgacgatgttgcggccgcgcagcaggtcggcggctttatccagcgcgtcgtccaggctcagcttgccgccgttggccagcagtggctgacgtgggcggtcttcacggttgacgtagccatagccgaaacggccacggtcgcacaggaagtactggttgaccgaaccgttgaagcggttttcgatacgacgcagttcgccgtagcgctcgcccggggagatgttgcaaccgctggagcaaccatggcagatgctcggcgagaactgcatgtcccacttacggttgtaacgctcggagtgagtcttgtcggtgaacacaccggtcgggcagacctcggtgaggttgccggagaactcgctttccagcacgccatcttcaacgcgaccgaagtacacgttgtcgtgggcgccgaatacgcccaggtcggtgccgccggcgtagtctttatagaagcgcacgcagcgatagcaggcgatgcagcggttcatttcgtgggaaatgaacgggccgaggtcctggttctggtgggtacgcttggtgaagcgataacggcgctcgttgtggccggtcatcaccgtcatgtcttgcaggtggcagtgaccgccttcctcacagaccgggcagtcgtgggggtggttggtcatcagccattcaacgacactggcgcggaacgccttggattcttcatcttcgatggagatccaggtgttgtcggtggctggggtcatgcacgacatgacgatacgaccacgggtgtcgttctcgtcggtgtattgcttgaccgcgcactggcgacaggcaccgacgctaccaagcgcggggtgccagcagaaatacgggatgtcgaggcctagtgagagacatgcctgtaacaggttgtctgccccatcgacttcgagcgctttgccgtctacgtggatagtggccatggttcaaagttcttcgttggcccgttgtcagcgggcgtggctaatggaatcttgttattcatgggcatcaacacagcctttacggcgtcagcccatgagaaagcgaagggcacggacccttcgcctttttaagcgttacgcgccgactacgatcggccttgccagaggcgggacggcggcgctggtaggcgcgatgccggcttcgaactccgagcggaagtatttgatggcgctgcccaatggctccacggcgcccggtgcgtgagcacagaacgtcttgcctgggccgaggaagccgaccagacccagcagggtctcgatgtcacctggctggccttcgcctttctcgatcgccatcaagagcttcacgctccatggcaaaccgtcacggcaaggggtgcagaaaccacaggattcacgggcaaagaattgctccatgttgcgcagcagcgagaccatgttcacggtgttgtccaccgccatcgccaggcctgtacccatacgggtgccgaccttgccgatgccgccggcgtacatctgtgcgtcgaggtgctcgggcaacaggaaaccggtgccggcgccgcctggctgccaggctttcagggtgtagccgtcgcgcatgccgccggcgtagtcctcgaacagctcgcgtgcggtcacgccgaacggcagctcccacaggccagggttcttgaccttgccggagaagcccatgagcttggtgcccatgtcttcactgccttcacgggccaacgatttgtaccagtccacgccgtcggcgatgatcgccggcacgttgcacagggtttcaacgttgttcacgcaggtcggcttgccccacacgcccacggcggcagggaagggcggcttggagcgcgggttggcgcggcggccttcgagggagttgatcagtgcggtttcttcaccgcagatgtaacgcccggcgccggtgtgcacgaacagttcgaagtcgaaacccgaaccgaggatgttcttgcctaacaggcctgcggccttggcttcttccacggcacggttgaggtgcttggcggcggtggtgtactcgccacgcaggaagatatagccacggtaggttttcagcgcgcgggcgctgatcagcatgccttcgatcagcagatggggcagttgctccatcagcatgcggtctttccaggtgttgggttccatttcatccgcgttgcatagcaggtaacggatgttgatggattcgtctttaggcatcaggccccacttaacgcccgtggggaagcctgcaccgccgcgacctttcaggcctgcgtctttcacggtctggacgatgtcgtcctgggccatgtcggcgaaggctttgcgcgccgccgcgtaaccgttcttggcctggtattcgtcgagccataccggctcggcatcgtcacgcaagcgccaggtcagcgggtgggtctcaggcgaacgcttgatcaggttggccgggccgaaagatgtaagggtcatgggtagccctcaagcaattgggtgacgccagcaggctgcacgtcaccgaatgtgtcgtcgtcgatcatcaacgccggcgccttgtcgcagttgcccaggcagcacaccggcagcagcgtgaagcggccgtccgcagtggtttggccgaggccaatgccgagcttgctctggatttcgctgaccacggattcgtgaccaccgatgtagcagaccatgctgtcgcacacgcgaatgatgtgacggcccaccggttggcggaagatctggctgtagaacgtggccacgccttcaacgtcgctggcggggatgccgaggatttcgccgatggcgtagagggcgccgtccggcacccaaccacgttccttctggacgatcttcaaggcttcgatcgacgccgcgcgcgggtcttcgtagtgatgcagctcgtgctcgatggccgagcgctcggtttcactcaaggtgaaacggtctgtctggataagcgtgctgttcatgcttagcggtccacgtcggccataacgaaatcgatactacccaggtacgcaatcaagtccgcgaccatctcgcctttgatcaccgaagggatctgctgcaagtgggcgaagcttggggtacgaatccgggtgcggtagctcatggtgccgccatcgctcgtcaggtaataactgttgatacccttggtcgcttcgatcatctggaaggattcgttggccggcatgaccgggccccacgaaacttgcaggaagtgcgtgatcagggtttcgatgtgctgcagcgtgcgctctttgggcggcggcgtggtcagcgggtgatccgccttgtacgggccggctggcatgttgcgcatgcactgctcgatgatcttcaggctctggcgcatttcttcgacgcgcacgatgcaacggtcgtaggcatcgccattggccgccagcggcacttcgaactcgaagttctcgtagccggagtacgggcgcgctttacgcaggtcgaagtcgcagccggtcgaacgcaggccagcaccggtgacgccccattccagggcctctttggtgttgtactgggcgacgccgatggttcgacccttgaggatgctgttatccagcgcagccttttggtactcgtccagacgtttgggcatccagtcgatgaattccttgaccaggcgctcccagccattcggcaggtcgtgggccacaccgccgatgcggtaccaggcagggtgcaggcggaaaccggtgatggcttcgatgaccttgtaggcgcgctgacggtcggtgaaggtgaagaacaccggggtcatggcgccgacgtcctggatataggtacccaggaacagcaggtggctggtgatgcggaagaactcggccatcatgatgcggatggtgtcgacgcggtccggcaccttgatgcccgccagcttctcgaccgagagcacgtacggcaggttgttcatcacgccgccgaggtagtcgatacggtcggtgtacgggatgaagctgtgccacgactgacgctcggccatcttctcggcaccacggtggtggtagccgatgtccggcacgcagtcgacgatttcttcgccgtccagttgcaggatgatacggaaggcaccgtgagccgaagggtggttcgggcccaggttgaggaacatgtagtcctcgttggtgccggagcgtttcatgccccagtcttccggacggaagcgcgcggcctcttcttcaagctgttgcttggcgaggttgaggctgaacgggtcgaattcagtggcgcgggcagggaagtccttgcgcagcgggtgaccttcccacgtcggcggcatcatgatgcgcgtcaggtgcgggtggcccgggaagtcgatgccgaacatgtcccacacttcgcgctcgtaccagctggcgttcggccagataccagtcacggtcgggatgctcaggtcgctctcggagagggcaaccttgatcatcacgtcgctgttacgttccagcgacatcaagtggtagaacacggtgaaatcggcgccgctcggcagcccttgacgcttggtgcgcagacgctcgtccacgccatgcaggtcatagagcatgacgtacggcttgggcaggttgcgcaggaaggtcaggacttcgacgagcttggcacgcgccacccacagcaccggcataccggtgcgcgtggcctgggcggtgaaggcgccagggccaaaacggttattgagttcgacaaccacatcctggtcgtctgccttgtaaggcgggatatacagagcactgcctgtagtcatggtttttttatcgctttcggtcaacgtaaagaatgaagccaggtgttcgttctataaaagaaacgtgctggatcagacttcgtcagggctgcgcaggttggtgactgcgattcgctgttcgcggcgctgttccttttgtgacggcatctcggcgcgataaacgccttgatcaccgacaacccaggaaagcgggcgacgctccttgccaatcgactcctgcaacagcatcaagccttgcagaaatgcttcagggcggggcgggcagccaggcacgtagacgtccacgggcaggaacttgtccaccccttgaacgacggagtagatgtcgtacatgccaccggagttggcgcacgaacccatggagataacccatttcggttcgagcatttgctcgtagagacgctgaatgatcggcgccatcttgatgaagcaggtaccggcgataaccatgaaatccgcctggcgcggcgaggcccggataacttcggcgccaaagcgcgcgatgtcgtggggcgccgtgaaggccgtggtcatttccacgtagcagcacgaaagaccgaagttgtacggccacaaggagtttttacgcccccagttgaccgcgccactcagcacgtcttcgagcttgcccatgtagatgtttttgtggacttgatcttctaacggatcggaaacggtttcccgttcgccgatagggtactgatcgttaggagcatccgggtcgatcctggtgagattgtattgcatcgccaaagcctcattgtttcagcttcgcttgccgcttacgacgagcttccggagcccagtcaagggcgcccactcggaataggtagacaaggcctgccaacagaattgctatgaaaacgagagcttcgacgaatccggtccagccgctttcgcggacggacacagaccaggcaaagagaaagagggcttcgatatcgaagatcacgaagagcatcgcgaccagatagaatttggctgagagccgcagacgggcgccacctgtaggcagcatgccggattcgaacggttcatttttgctgcggccccaggcttttgacccgaggaggctggagacgccgagcatgaaggcgcaaaggccgacaacaccgaggaggaaaatggcaaagccccagttgtgggccatgagtcctgtcgcttcggtcatgctggaaatccttaacagagagcaaaggtctctgagctcgaaaaagtaacgatgcagtgacgatatgtcgcacggcaatcaatcgcggtgattttatggctaaacaccgggcaagtaaaattccgatagcgaaattattcgatggaataagcacatagtgcaccttcttggggctgtagcccttgccgggcggggattagcgggtatttgatcaattctgttttgtttgagcggtaacgaagttttcatgctccaaatgataatgactattgtttgtgcggagtttaagcgaatgtttctcgtgtggcgggggaagttgttgttacttgcttgattgcggctagttgcttgaacggatcttttaaccgatttgatccggccaaataccgcactggatcaatgttttgccaaaaatctcaagaccagcagggtcagtgtgggagctggcttgcctgcgatagcggcggatcagctgacacatttgtctcagacccactgctatcgcaggcaagccagctcccacatttgtttttcggtgcgctcgaaacaaaaaaaacgccccgaacaggtcggggcgtgatttttgtgcggcacggcggttaggtcttccgtggggccgccgtggccgtgtactcgatgctgcttagtggaactgttcttcttccgtcgagccggtcagcgcggtcacggacgaagtaccgccctgaatcacggtggtcatgtcgtcgaagtagccagtgcccacttcctgctggtgcgccacgaaggtgtagcccttcgatgcgtcagcgaattcctgctcttgcagcttcacgtaggcggtcatgtcgttgcgggcgtagtcgtgcgccaggttgaacatgctgtgccacatgttgtgaatgccggccagggtgatgaactggtgcttgtagcccatggcggacagttcgcgctggaacttggcgatggtcgcgtcgtccaggtttttcttccagttgaaggaaggcgagcagttgtaggacagcagttggtccgggtattcctttttgatcgcttcggcgaagcgacgggcttcgtccaggtctggcttggcggtttcgcaccagatcaggtcggcatacggtgcataggccaggccgcgagcgatagcctggtccaggccagcgcgcactttgtagaaaccttcctgggtgcgctcgccagtcacgaacggcttgtcatacgggtcgcagtccgacgtcagcaagtctgctgcgttggcgtcggtacgagccaggatgatggtcggcgtaccggcaacgtcagcggccaggcgggcagcagtcagcttctgcacggcttcctgggtcggcaccagtaccttgccgcccatgtggccgcatttcttcacggaagccagttggtcttcgaagtgcacgccggcagcgcctgcctcgatcatgctcttcatcagctcgtaggcgttcagtacgccgccgaaaccggcttcagcgtcagccacgatcggcgcgaagtagtcgatgtagccttcgtcgcccgggttcttgccggctttccactggatctggtcggcacgacggaacgagttgttgatgcgcttgaccacggtcggcaccgagtcaaccgggtacagcgattggtcggggtacatggattcagcggagttgttgtccgctgccacttgccagccggacaggtagatcgcctggataccggctttcacctgttgcactgcctggccgccagtaagggcgcccatgcagttgacgaaatctttgtcgggacggaaggaaggcttggcaccttgggttaccaggttccacagcttctcggcgccgagttttgcaaaggtgtgctcaggttgaaccgagccacgcaggcggacgacgtcagcagcggaataagcgcgggtcacgcctttccagcgtgggttttcagcccagtctttttcaagggctgcaatttgctgttcgcgtgtcagtgccatggagataaacctcgtcgcgtttagaagatccgttttccagccgtgcattcaatgcgtgggcagggctgctcgctgaccagaagcttaggcggtcatgtcgggtttggcggggaaggcgacgggatgaacgtggtgctcaagggggagttgaacaggtaagggcaaactgcgggcagtcttcaggcatcgtgggccttggtacgatccatcagtgtgtagccgggttacctggttagcttccgtccctcgggacaacttcgttccagtcgcaacctcgtcaaacacgccttatgggcggtacagacacgaatcggctcgggtgggtagcttggagcggcgatccgaaggcccttgccagggcccctgattagcgggagcgaggccatcatgcccatggatttttggctcgtcaaacgttttgtagtgcttttttcaaagcactacatctttggtctaatacgactcgccagtcagtttttggtgcttcagttcagggtgtcgactttgacccgcaaagtcaggtcatcacggccctgagtagagtagctgcgggttgtagaggatttgtcggcctgggtctcgcgattgatgccggccagggggatccattcacccaggcgaccgctgacggttgtgtcggtactttgcacattcactacatcgggacgttcctggctcatgcggtcacggttggtactgatggccaggtgaacggtctcaccggtgacgctcgctgtcacgtagaaaccctgggtgacgttgcgatactgggtctggttttgcaggcgcccatagctatcttgctgggtggtggtcagcggtacactctggccaacctgtatcagtgccggcacgccttcgctggcctggatttgctggatgccgccgtcacggctggcagtgccatagctgatgatgcgggtctggttgtcgccggtgttctgttggttgttttcgttggtgtcgacggtgatcagcaggcgcttggcgggtgtgtccagctgagagagcaaggcgcgcaggtcctggattttgcctgggtctgcgttgacgatcagctggttgccgtaggcgctgacagtgccgtccttgccgataaaattctgcgcgactggcagcaggtcagcgctggtgcggttgctcaggttgacgacttcggtgtcggccatggctgaagcgctggcggtcaggagaagggcgatgagcagggtgcgtagggacatgtccgttatctctgcgagtcaaaggcttgatagtgccagtttgtcggcctggcaggtcgcaagttgaatcgtagacggcaaaatgccctggcaggcagggcattttgggtgttgctgagaaagccatcgcaggcaagccagctcccacaggggaatgcattccaaatgtgggagctggcttgcctgcgataagggcggctcggtttcggatcagccctcgcgcaccatgtctacatgcggaataccgacctcaagaaactcgtcactgacgatcttgaagcccaaccgctcataaaacggcgccgcatacacctgcgcactcaggaactgtttggtctggccacgcttctcggcttcgccgatcaccgcgtccatcagcttgtcgcccacattcagcccgcgccagtccttgaggaccgatacacgaccaatctcgcccgtaggcagcaggcgtgcagtgccgatgggaaagtcgccttcaaacgcgagaaaatgcaccgcgcccgcgtcttccgcgtcccactcaagctccggtggaaccgattgctcagcgataaataccgcttcacgaatgcgccgtatctcggcgatatccttttgccagtccgcgacacttacgtgaatcttattcatcggcaaatcccaggcttccttgcttgaccaattcacacagcaaatcacggccatcttcatccgcgagccatgggccgaggttttcggcgtgcagggcgtcggcggcgcaaatcattttcagcagttcgcgcaacttgcctggcaggtaacggctctggccgctggcgaacagcagcacgtcgtcgtccacttccgaccaggccatgcgcgcgcttgggttacgtaccaagatcgcgccgtcttgcagggcgttgatgaagtcttcttcgcccaattcttcgccggccaccaattcagggtagcgcggctcagtcatgaactggccgaaccaggtcagcagcatgcgctcgtcgctcatgtgctcggccagcaagcctttgaggcggtccagcgcgtcgccctgaatctggtgcgggtcgctcactggctgtgcatcggcatcagtgtagcgttcctcgtcagtcaggtactggctgaggaagtcggtgaagtgggtcagcacttcggcggcgctcggtgcgcggaagccgaccgagtaggtcatgcagtcatcttcggcaatgccgaagtgcgccaggcgtggcggcaggtacagcatgtcgcccggctccagcacccattcagcgctttcttcgaattcagcgaggatgcgcaggtcggcgtgctgcagcagcgggctttcggagttgcacatctggccgatcttccagttgcgcttgccctgggcttgcaacaggaacacgtcatagttatcgaagtgtggacccacgctgccacccggtgccgcaaagctgatcatcacgtcatcgatgcgccagcttggcaggaagcggaattgctccagcagttcggcgacttccggcacgaactggtcgacagcctgcaccagcagggtccactcacgctcgggcagggtgctgaacgcgtcttcagcgaacggcccgcgacgcaattcccaagggcgctcgccgtgctcgatcaccaagcgcgattcgacttcttcttccagggccaggccggccaattcgtcggcgtcgatcgggctttcgaaatcaggaatggcctggcggatcagcagcggttttttctgccagtagtcgcgcaggaattcccgtgccgtgatgccgcccagaagttgaagagggatatcaggattcatgtgtaacctattgaaagaaagcacttttcagactggaataaaaacgcccggcgcggccgggcgtctcaagggtcttgcgtgtatcagatgcgcttggcttgctctacagcgttgccgatgtagttggccggggtgagcagtttcagctcggccttggcggcggctggcatgtccaggccgtcgatgaaagtttgcagtgcttcagggctgatgcccttgccgcgcgtcaactctttcagcttctcgtacgggttttcgatgttgtagcggcgcatcacggtctggatcggctcggccaacacttcccagcacgcgtccaggtcagcggcgattttctgcgcgttgagctccagcttgctgatgcctttgaggctggcttcgtacgcgatcacgctgtgagcgaagcccacgccgaggttgcgcagcacggtggagtcggtcaggtcacgctgccagcgcgagatcggcaacttgctggccaggtgctggaacagggcgttggcgatgccgaggttgccttcggagttttcgaagtcaatcgggttgaccttgtgcggcatggtcgacgaaccgatctcgccggcaatggtgcgctgcttgaagtagcccagggaaatgtagccccagatatcgcgatcaaagtcgatcaggatggtgttgaaacgcgcaatggcgtcgaacagctcggcgatgtagtcgtgcggttcgatctgcgtggtgtaggggttgaagcccaggcccagctcctcttcgatgaaggcgcgggcgttggcttcccagtcgatttccgggtaggccgacaggtgggcgttgtagttgcccacggcgccgttgatcttgcccagcagtggtacggccgcgacttgagcgatctgacgctccaggcggtagaccacgttggccagctctttgcccagggtggtcggcgaagccggttggccgtgggtgcgcgacagcatcggcacgtcggcgaagcggatggccagttcacggatggcgttggcggtctgacgcatcagcggcagcatcacgtcatcacggccttcacgcagcatcagggcgtgggacaggttgttgatgtcctcgctggtgcaggcaaagtggatgaactcgctgacctgggccagttccggcagcttggccgcttgctctttgagcaggtattcgatggctttgacgtcgtggttggtggtgcgctcgatctctttcacacgctcggcgtgctccagggagaagttttccgccagggtgttgagcacagcgttggcttcggcggagaacgccggcacttcgctgatggcggggtgagcggccaggcgctggagccagcgcacttcaaccagaacacgagcacggatcaggccgtattcgctgaaaatagggcgcagggcctgggttttgccggcgtagcggccgtcaacaggggaaaccgcagtgagcgaagagagctgcatggggtgttctcggacagtcgggcaacgaaatggggcgcgtatcatacatgaaaaaatccgccggtccgtcgccaactgaccggcgtattacgcgtgaggctataaaaaaacaggtcgctgcgacttattcgttgcgcatcaacgggtaaagctctttgagcaatttgcggcggctgatcaccagctgccaacgatggccgcccaactggcgccacaaccgcgccgaacgaatgccggccaggagcagggcgcggattttcgaggcgttgttcggttgctgcaggttgcgcatgtcgccgtgcacctggatacgctggcgcaaggtgctcaaggtatcctggtacagcgcaccacaggcggcgatcacgttttcgtgtgccgggccgaagtgctccacctgggactggatctgcggcaggcgtttgccgatggtttcgagcatgtcctcgcgcttggccagttggcgttcgaggccgagcatcgacagcgcatagcgcaacggctcgcgctgcagggtactcgggtcgcgctccagggcgccgatcagcgcgcggtaaccttcgcgcaacgccaggtcatcaccgccgtagacttccagggtgtccttggggtcgcggatcagcaggctgccgagcatgcaggtcaggccggcttcggtgacctggccggtcttggcaatcttgtccaccaggacggcggcgaggaaaaccccacccagtgccgtcaattgctcctgggtcgggctcatgccttttggctccaggcttcggcgacttcaatcacgccgccgcccaggcagatttcgccgtcgtagaacaccacggactggcccggagtcactgcgcgctgcgggtcatcgaaggtggcgcgatagccggtcgcggttttttccagggtgcagggctggtcgctctggcgataacgcactttggcggtcaggcggcgcggggtgctcaggtcgatcgggttgacccaatagatctccgaagcgagcagggcgcccgaaaacagcagcgggtgctcattgccttggccgacgatcagcacgttgttttccaggtccttgaccagcacgtaccacggttcttcgccggcatctttcaagccgccgatgcccaggccctggcgttggccgatggtgtggtacatcaagccgtggtgacggccgatgacttcaccttcagtggtctttatctcgcccggttgtgccggcaggtattgcttgaggaagtcgctgaagcggcgctcgccgataaagcagatcccggtggaatccttcttcttggcggtggccaggccgtgtttctcggcaatcttgcgtacttcgggtttttccagttcgcccaccgggaacagggtcttggcgatctgttcaccgccgacggcgtgcaggaagtagctctggtccttgttcgggtccaggcctttgagcagttcggtgcgaccatcgatatcgcggcggcgcacgtagtggccagtggcgatcaggtcggcaccgagcatcatggcgtagtcgaggaacgccttgaacttgatctctcggttgcacaggatgtccgggttcggcgtgcgtccggccttgtattcggccaggaagtgctcgaacacgttgtcccagtactcggcggcgaagttggcggtgtgcagctttatgccaatcttgtcgcatacggcctgggcgtctgccaggtcgtccatggcggtgcaatattccgttccatcgtcttcttcccagttcttcatgaacaggccttccacctcataaccctgctccatgagcagaacggcggaaacggaagagtccacgccaccggacatgccgacgatgacgcgcttcttttgtgtgtcagaaggggctggatcacgcatagggtttcaacgggtgtcttgaaaaaggacgcgattctatcaggctcaggccttcaaggctaaagagaagggcggatcaattcgagactgtggcgctggccggccagataatcatcgatgcagcggatgatcaactcgctgcgccagtcgtcgcgtacggccatcagctcatcacgggtcagccagcgggcgcgcaggatgccttcgtcgagttgatagtccgggtggtgtttcagtgccttggcgataaagcagacccgttggtaggtcacgccgttgctcggggccgtgtacaggtaaatgccgacgatgccggtggcttcgacgtcccagccggtttcttcaagggtttcgcgcacggcagcttcggtgagcgtttcgtgcgggtccaagtggccggcaggctgattgagcacggcgcggccgcccttgagttcttcgaccatcaggaagcggccgttgtcttcgacgatggtggcgacggtgatgtggggttgccaggtcatttaaaagctcgattccgggtgtgacgcggtcagtgtgggagctggcttgcctgcgatagcagtctgtcagttgatatagatgcagctgacccaccgctatcgcaggcaagccagctcccacagttaattgggtttgttcagtgaaaacggggtgtaaataaaaaccccggcacggggccggggcttctttgcttccttacaaccttacttcaacttggcaatggccgcgttgagggtgttgcttgggcgcatggctttgctggtcagctcagggttcggcgagtagtaaccgccgatgtccactggcttgccctgtacggcgttgagttcggcaacgatggttgcttcgttcgcagtcagggtttcggccagttcggcaaactgcgcttgcagtgcagtgtcttcagtctgggcagccagggcttgagcccagtacagcgccaggtagaagtggctgccgcggttgtcgatgttgccgactttgcgcgatggcgacttgttgttgtccaggaactggccggtggcctggtcgagggttttggacagtaccagggctttcgggttgttgtacgtcacacccaaatgctcaagggaagcggccagggccaggaactcgcccagggaatcccagcgcaggaagttctcttccaccagttgctgcacgtgtttcggagccgaaccaccggcgccggtttcgaacaggccaccgccgttcatcagcggcacgatggacagcatcttggcgctggtgcccagttccatgatcgggaacaggtcggtcaggtagtcgcgcagcacgttgccggtcaccgagatggtgtccaggcccttgcgggtgcgctccagagtgaacttcatcgcgtcgaccggcgacatgatgcggatgtccaggccttcggtattgtggtctttcaggtaagcctgaactttctcgaccaccacgccgtcgtgcgcgcgtttcgggtccagccagaaaacggccggggtgttgctggcgcgggcacggttgacggccagtttgacccagtcctggatcggcgcgtctttggtctggcacatgcggaagatgtcgccggcttcaacagcctgttccatcagcagggtgcccttgctgtcggtgacgcgaacaacgccgtcagccttgatctggaaagtcttgtcgtgggagccgtactcttcggctttcttcgccatcaggccaacgtttggcacgctgcccatggtggtcgggtcgaaagcgccattggccttgcagtcttcgatgaccgcctggtagatggtggcgtagcagcgatccgggatcacggccttggtgtcgtgcaactggccgtcggtgccccacattttgccggagtcacggatcatcgccggcatcgaagcgtcaacgatcacgtcgctcggcacgtgcaggttggtgatgcctttgtcggagttgaccatcgccagcgatgggcgagcggcgtagaccgcctgaatgtcagcttcgatctgcgcttgttgctcggcaggcagggccttgatgcgagcgtacaggtcgccgatgccgttgttcaggttgaagccgatctgggccagcacgtcagcgtgcttggtcagggcgtctttatagaactcggcaacgatctggccaaacatgattgggtcggagaccttcatcatggtggctttcaggtgaaccgacagcagcacgccttgtttcttggcgtcttcgatttccgcggcgatgaacgcgcgcagggctttcttgctcagcacggcggtgtcgatgatttcgccggcttgtaccgaggtcttttctttcaggaaggtcgcggtgccgtcctgggcgataagctcgattttgacagcatcagcggcttcgatctgcacggctttttcgctgccgtagaagtcgccgttgctcatgtgggcgatgtgcgacttggagtcggcagcccaggcgcccattttgtgcgggtgcttgcgcgcgtagttcttgaccgacagcggtgcgcggcggtcggagttgccttcgcgcagaaccgggttcacggcgctgcccttgaccttgtcgtaacgtgcgcgggtttctttttccgcgtcggtggttacggtttccgggtagtccggcagggcgtagcccagggcctgcagttccttgatcgcagcttgcagctgaggggtcgaggcactgatgttaggcagtttgatgatgttggcttcaggcgtcacggccaggtcgcccagttcggcgaggtggtccggtacggctttggcgcccagttgctcggggaagcttgcgaggatgcgcccggcaagggagatgtcgcgggtttccacagcaatatcagctgaagcggtgaaggcctctacgataggcagcagtgaataggtggcgagggctggggcttcgtcagtgaaggtgtagatgatcttcgagcgggtgggcatattcggattaactctcttctttgctgaaagcgtgcgcagaaactcgagatgcgccgggtggagcgcgttcgttcaaagtcatccatgagcgaaatgtcgaggtttcttcgcggtgatgttgggttgcatcagtcgagcgtcaagcgggtggactattgtaatagtcctgctttctggtggagggcccggttctagagcggtccgccgtcgtgactcttgggtcagcggcggcattatacataggtcactatgcttacgccgagccttcatacaaaaggtgtgtcgtccattggtctaaaggtcgcaggtagttcgtcatgtcggagcaagcacgatgtgctcaagattggcgattttgccttctgtctgaggcttgtaggcgacttgatgtgctgttttcgatgcaaatgagcatggcgcgaggtttcagtcgccatttatctggagtaggctcgaacgcagccagatgttcaatccatagatggagttcaacatgggatacaagaagattcaggttccggcagtcggcgacaaaatcaccgtcaatgcagaccattctctcaatgttcctgacaaaccgatcatcccttatatagaaggcgacggtattggcgtcgacatcagcccggtgatgatcaaggtagtcgatgcagctgttgaaaaggcctacggcggcaagcgcaaaatctcctggatggaggtttacgcgggcgaaaaagcaactcaagtctatgaccaggacacctggctgccccaggaaaccctggatgcggtcaaggattacgtggtgtccatcaagggcccgctgaccacgccggtcggtggcggtatccgttcgctgaacgtggccctgcgtcagcagctcgacctgtatgtatgcctgcgcccggtgcgctggtttgaaggcgtgcccagcccggtcaagaagccgggtgacgtggacatgaccatctttcgtgaaaactccgaagatatttacgccgggatcgagtggaaggccggctcgcccgaagcgatcaaggtcatcaagttcctgaaagaagagatgggcgtgaccaagatccgctttgatcaggactgcgggattggcgtgaagccggtttccaaagagggcaccgagcgtctggcgcgcaaagccctgcaatatgtggtagataacgaccgcgattcgctgaccatcgtgcacaaaggcaacatcatgaagttcaccgaaggtgccttcaaagagtgggcctacggcattgccgagaaagagttcggggcgacgctgctcgacggcggcccgtggatgcagttcaaaaacccgaaaaccggcaagaatgtcgtggtcaaggatgcgatcgccgacgccatgttgcagcagatcctgttgcgcccggctgaatatgacgtgattgctaccctcaacctcaatggcgactacctgtccgacgcgctggcggcggaagtgggcggtatcgggattgcgcccggggccaacctgtcggataccgtggcgatgttcgaagccacccacggcacggcgccgaaatacgcgggcaaggaccaggtgaacccgggttcattgattctgtcggcggaaatgatgttgcggcacatgggctggaccgaggcggctgacttgattatcaagggcaccaatggtgcgatttcggccaagaccgtgacctatgacttcgagcgcctgatggagggcgcgaagctggtgtcgtcgtcgggctttggggatgcgttgatttcgcatatgtaacgcagaagcataaaaagccagccacccctgtgaaacggagtggctggctttttaatgggtgctcgctcggtggctgatcaggccagttgcttttctgatttttgagcgtggccttcctgcggggcgccggtggagatgagcgcctggatattcgaagcgtgcaagcccttcggcccttgagtaatctcaaatgaaaccgcttggccggctttcagtgttttatatccttccgattgaatcgccgagtaatgcgcaaacaggtcttcgctgtctttgccgtcttcgttgatgaagccataacccttggcgttgttgaaccacttgaccttaccgctagccatagccatatccctctgcaccagactccatcactggagtatcatccagtttatccgtcctaacccgaataaattaaggttgactgcgcggaccttttttacccactgtgggttctattggttgtaacaccgtttcgccgatagtcaaggcgaccagtcggtcagagttgaatttctgacaggtcgcccccaccactgtatttgaaccactgacgaaccattctttccatgcatgcaaacagccagattcgactaacattcaatcaggatcgcccggatcaggaacatgacgacgacggttctgcaggcattgctgttcaggaggccaagccagctctgcaggcgccgccgatgtacaaggtggttttgtttaatgatgattacacaccgatggatttcgtcgtcgaagtgctcgaggtgttttttaacctgaaccgcgagttggcgaccaaggtaatgctggccgttcacacagaaggacgggcagtatgtggagtgtttacccgcgacatcgccgagacaaaggccatgcaggtcaaccagtacgccagggaaagccagcatccgctactctgtgaaatcgagaaggacggttaacgccgaccacttgggtatgaggtgaagctatgttaaaccgcgagctcgaagtcaccctcaatcttgccttcaaggaggcccgttcgaagcgtcatgaattcatgaccgtcgaacacctgctgctggcacttttggataatgaagctgccgccaccgttttgcgtgcgtgcggcgccaacctcgacaaactcaagcatgacctgcaggagttcatcgactccaccacgccacttattcccgttcacgatgaagaccgcgagacccagccaaccctgggctttcagcgcgtacttcagcgtgccgtgttccatgtgcagagctccggcaagcgagaagtcacaggcgccaacgtgctggtggcgattttcagcgagcaggaaagtcaggcagtgtttctgcttaaacagcagagcgttgcccgtatcgatgtcgtcaactacatcgcccacggtatctccaaggtgcccgggcagggcgatcattccgagggtgagcaggatatgcaggacgacgagggcggcgagtcttcttcttcaagcaacccgctggatgcctatgccagcaatctcaatgaactggcgcgccaggggcggatcgatccgctggtggggcgtgagcttgaggttgagcgtgtagcgcagatcctcgcgcgccgtcgcaaaaacaatccgttgctggtgggtgaggcaggcgtgggtaaaaccgcgattgccgaaggcctggccaagcgcattgtcgacaaccaggtgcctgacctgttggccaacagtgtcgtctactccctggacctgggcgcgttgctcgccgggaccaaataccgtggtgatttcgagaagcgcttcaaggcgttgctcggcgagctgaaaaaacgcccgcaggcgatcctgtttatcgacgagatccacaccattatcggcgccggtgcggcgtcgggcggggtgatggacgcctccaacctgctcaagccgctgttgtcgtcgggtgatatccgctgcatcggctcgaccacgttccaggagttccgcggcattttcgagaaggatcgtgccttggcgcgccgcttccagaaagtcgatgtgtccgagccttcggttgaagacaccatcggtatcctgcgcggcctcaaggggcgtttcgaggcgcaccacggcatcgagtacaccgatgaggcgctgcgtgcagctgccgagctggcgtcgcgctacatcaatgaccgccatatgccggacaaggccattgacgtgatcgacgaggcgggcgcctatcagcgcctgcagccggtcgagaagcgtgtgaagcgtatcgatgtgcctcaggtcgaggacatcgtggcgaagatcgcgcgaattccgcctaagcacgtcaacagttccgataaggagctgctgcgtaacctggagcgcgacctcaagctcaccgtattcggtcaggatgcggccatcgacgcgctgtccaccgcgatcaagttatcgcgtgcgggcctcaagtccccggacaagccggtcggttcgttcctgttcgcaggccctaccggcgtcggcaagaccgaagctgcgcgtcagctggccaaggccatgggtatcgagctggtacgtttcgacatgtccgagtacatggagcgtcacaccgtgtcgcgcctgatcggtgcgcctccgggctatgtcgggttcgaccagggcggcctgttgacagaagcgatcaccaagcagccacactgcgtattgctcctcgatgaaatcgagaaggcgcacccggaagtcttcaacctgctgctgcaggtgatggaccacggtacgctgaccgacaacaacgggcgcaaagcggatttccgcaacgtgatcgtgatcatgaccaccaacgccggtgccgaaacggctgcgcgggcttcgatcggcttcagccatcaggatcactcttccgatgccatggaagtgatcaagaagagctttacgccggaattccgcaaccgcctggacaccattatccagtttggtcgcctcagccatgaggtcatcaaaagcgtggtggacaagttcctcaccgagcttcaagcgcagttggaagacaagcgcgtgcagttggatgtcaccgatgcggcgcgcaattggctggccgagggtggctacgacgcggcaatgggcgcacgcccaatggcacgtctgatccaggacaagatcaagcggccattggctgaagagatcctgttcggcgagctgtctgaccatggcggcgtggtgcacatcgacctgaaggatggcgagctgaccttcgagttcgaaaccacggccgaaatggcctgatcgctgacagcaataaagcaaaaaggcgccgaaaggcgcctttttgctgtgctgcatttggaatgctttcttcacggcagcagggatcagctgtgggagctggcttgcctgcgatagcggtgtgtcagttgaaggctatttttctgatgggccgctatcgcaggcaagccagctcccacagggtcaagcggtgactggtaaatggcgcacacacaaaaacgcccggcataaccgggcgttttgtattgacttgcttagcgagcgcggtaagtgatgcgccctttgctcaagtcatagggcgtcagctcgacgcgcactttgtcaccggtaagaatacgaatgtagttcttgcgcatcttgccggagatatgcgcggttacgacgtgcccattttccaactccacacgaaacatggtgttgggcagggtgtcgacgacagtgccttccatttcgaagctgtcttctttcgacatgcagtaaagccctcggtatccagtgaatggcccggtgcaactgcgccaggcaaaagcggcgtgcattgtgcccgaaaaagggtgtttaagccaaggggttctagttaagcgtgacccatctttgattaatcagcagttctatgggccgatattgggtcttgtagttcatctttttgcagtttttgatccagtagccgaggtacaccgcctccagttccaggcgcagtgcttcaccgatttgccagaggatggcgaaccgccccaggctgcggcgctcttcggcgggttcataaaaggtgtagaccgccgacagcccgttgggcagcaaatcggtcacggcaacggccaccagacgaccgtcgaggcgaaattcatagaaccgcgaaaagggcaggtcgcgcaccaggaacgtcgaaaactggtcacggctgggcggaaacatatcgccgtcggcatggcgttgttcgatgtagcgctggtaaaggtcaaaatactcttcactgaaatgcggcttggtagcagtgatcgtcaggtcggcgttgcgcttgagaatgcgcttctggttgcgatccggcaggaattgcgccaccggaatgcgcgccggaacgcaggcattgcagttctggcagtgggggcggtacaggtgatcaccgctgcgccggaaccccatctccgacaggtcggcgtacacgtgcacgtccatgggctggctggggtcgaggaacagcgtggtggcctgctcgtcgggcagatagctgcaagagtgggcttgagtggcatagaacttcaagcgcgccagctcggtcatgatcaaccctcgggataagctttgaaataagtgtaagccaggtgcgcacaagtcgcctaggaaacccacggtccagagctgggttgatccaaatggttgtgcaaatagcgggtgaagtcatctcgcgggatggcgcgggcgccgaggctgtgcagatggtcattgggcatctggcaatcaatcagcacaaagccccaggcctgcaattgccgggtgagggtggcgaagccgaatttggacgcgttgtcggcccggctgaacatggactcgccaaagaacagctggcccattgcgaggccgtacaggccgcccaccagttcgccgttgtcccatacctccacggagtgcgcatagccacgccggtgcaactccaggtaggcactctggatgctttcggtgatccaggtgccgtcggcataggcgcggggtgccgcgcaggcctggatgacggcggcgaagtcgcggtcgaaggtcacggtgtagcgttgttggcgcagtagcttgccgaggctacgcgatacatgcagctcgtcggggaaaatcacggtgcgtgggtccggcgaccaccagaggatcggctggccgtccgaaaaccatggaaagcagccatgacgataggcttgaatcaatcgctcggccgacaggtcgccaccggcagccagcaggccattgggttcgcgcatggccttggccaatggcggaaatgtcagggagtcacgttgcaaccaggtcagcatggtatccaggcttacggtaggggaggggagtggcaggaatgtcgcctgccgtaatggggggattattgtcgacgcagcgccattgggccagcctgaatcgggcattggcgtggataagcgtgaacgggtgtttctgcaactctgtgcctgaggcgtggtcgtaaacggggctgggcgatgaaggccaattgccaagcttgccttgattcgtaaaaacacctcataagcctttgtcagtaaagacaatgcatgctcaaattgaacacgctgtgacacttcaattgtcagggcggccgggtgaggggcaagtacgtggcatcgccgacgcaaacccgtacaatgcgggcattgtggcgttatcgccatttcaccgatgcatcatccggtgttaaaaatagattcaacgacgctcgttcatttttcagctgcccggattgggcagtattcacagtcattaaacagatggacgcgctaaaggcgcaggaatagacccgttttgaagaaatccgccgcaacacccaaagcagcagtcgtgccggcctggcgtcagcacctgcattaccgcctcaaggaaggtgcgctgatcgccatcggcgcgctgtgcctgttcctgatgatggccttgctcacttacggcaaggacgatccgggctggagccacaacagcaagatcgaagacgtgcagaacttcggcggccctgccggttcctacagcgccgacatcctgttcatggtgctgggttacttcgcttacatcttcccgttgctgctggcgatcaagacttggcagattttccgccagcgtcacgagccgtggcagtggagcggctggctgttctcctggcgcctgatcggcctggtgtttctcgtactgtccggcgccgcattggcgcatatccatttccacgcgccgaccggcctgccggcgggcgcgggtggcgcgttgggcgaaagcctcggcgacctggcgcgcaggaccctgaatatccagggcagcacgctgatgtttatcgcgctgttcctgttcggcctcaccgtgttcaccgacctgtcatggttcaaggtgatggacgtgaccggcaagatcaccctcgacctgctggagctgttccagggcgccgccaaccgctggtggtcggcccgggtcgaccgcaaacgcatggttgcgcagttgcgtgaggtggatacccgcgtcaatgaagtggtggccccgagcacgccggaccggcgtgagcaggccaaggtcaaggagcgtttgatcgagcgcgagcaggccctgagcaagcacatgtcggaccgcgagaagcaggtgccacccgtgatcgccccggccccggccaaggcgccggagccaagtgcccgcgtgcagaaagagaaacaggcgccgttgtttgtcgacagcgccgttgaaggcaccttgccgccgatctcgattctcgacccggccgaaaagaaacaactcaactattccccggagtcgctggcggccgtcggccacctgctggaaatcaagctcaaggagttcggtgtcgaagtgacagtggattcgatccaccccggcccggtgattacccgttacgaaatccagccggcggcaggcgtcaaggtcagccgtatttccaacctggcgaaagacctggcccgttccctggctgtgaccagcgtgcgcgtggtggaagtcattcccggcaagaccaccgtgggcatcgagattcccaacgaagaccgccagatcgtgcgcttctccgaagtgctgtcgacgccggaatacgacaacttcaaatcgccggtcaccctggccctggggcatgacatcggcggcaagccggtgatcaccgacctcgcgaaaatgccgcacttgctggtggccggtaccaccggttcgggtaaatccgtgggcgtgaacgcgatgatcctgtcgatcctgttcaagtccggcccggatgacgccaagctgatcatgatcgacccgaaaatgcttgagctgtcgatctacgaaggcattccgcacctgctgtgcccggtcgtcactgacatgaaagacgccgccaacgccctgcgctggagcgtggccgagatggagcgccgctacaagctgatggcgaagatgggcgtgcgtaacctctcgggtttcaacgccaagatcaaggaagcccacgagcgcggcgagacgatcgatgatccgttgtaccggcgtgaaagcatccacgacgaagcgccgaaactgaccaagctgccgaccattgtggtggtggtcgacgaatttgccgacatgatgatgatcgtcggcaaaaaggtcgaagagctcatcgcacgtatcgcgcagaaggcccgtgccgccggcattcacttgatcctggcgacccaacggccgtcggtggacgtgatcaccggtctgatcaaggccaacattccgacgcgcatggcgttccaggtttccagcaagatcgactcgcgcaccatcatcgaccagggcggtgccgaacaactgttgggtcacggtgacatgctctacatgccgcccggcaccagcctgccgatccgtgttcacggcgctttcgtgtccgatgacgaagttcaccgtgtggtggaggcctggaaactgcgtggcgcgcctgaatacaacgacgacatcctcgccggtgttgaagaggccggcagcggcttcgacggcggcagcggcgggggtgatgacgatgccgaaaccgacgcgctgtacgatgaggccgtggccttcgtactggaaagccgccgtgcttccatttccgcggtgcaacgcaagctgaaaatcggctacaaccgcgccgcccgcatgatcgaagccatggaaaacgctggcgtcgtgactgcaatgaacactaacggctcgcgtgaagtcatcgcccccgggcagatgcgcgactgaccccgcgccgcgtggcagcacgcggcgcgccccgactactcaatgaggactcccatgcgtcttatccgcatgctgttgttgccggcactggccctgaccgctgtatcggcgcacgccgatccggcttccgtcgccagcctgaccaacctgctggacaaatccaagaccctgaccgcgcgtttctcccagctgaccctggatgccggtggcacccagttgcagcaaaccgaaggggaaatggccgtgcagcgcccagggctgttttactggcacaccgaaggcaagtccgaacagaccatcgtctccgacggccagaaggtcacgctgtgggacccggacctggagcaggcgaccatcaagaagctcgatccacgcctgaaccagacaccggcgctgctgttgtcgggtgacgtgtcgaaaatcaacgacagcttcgagattacctccaagcagaccagcaacgtcattgagttcacgctcaagccgaaatccaaagacacgctgttcgacaccctgagcctgtccttcggcaacggtgtgatcaacaacatgcgcctgatcgacagcgtcggccagcgcaccgatatcctgttctccggggtcaaggccaacgagccggtgccggcgtccaagttcaagttcgacatccccaagggtgccgacgtgatccaggaataaactgcttagaggtttcaaacgctgcccatggacctgtttcgaagtgacccgatctctcagccgctggccgcgcgtttgcgctcgaccaatctggacgagtacgtcgggcaggaacacctgctcgctcgcggcaagccgttgcgcgaagccctggagcagggtgcgctgcattcgatgattttctgggggccgccgggcgtgggcaaaaccaccctggcgcgcctgctggcgaaagtctcggatgcgcacttcgaaacggtctcggcggtccttgctggcgtcaaggagattcgccaggcggtggatgtggccaagcagcaggccgggcaatacggcaagcgcaccatcctgtttgtcgacgaagtgcaccgtttcaacaagtcacagcaggatgcgttcctgccctacgttgaagacggcacgctgattttcatcggcgccaccaccgagaacccctcgtttgaactcaacaacgctttgttgtcgcgagcacgtgtctatgtgctcaagagcctcgacgaagcggcgatgcgcaagctgttgcaccgcgcgttgggcgaagacaagggcctgggcaaacgccaactgagcctgggcgacgaagctttcaagattttgatgagtgccgccgatggcgacgggcggcgctttctcaacctgctggaaaacgcctccgacctggccgaagacaacagcgagattggcgtagacctgctgcaaagcttgctcggcgacacgcgccggcgcttcgacaagggcggcgaagccttctacgaccagatttccgcactgcacaagtccgtgcgcggttccaacccggacggcgcgctgtactggtttgcgcggatgatcgacggcggctgcgacccgttgtacctggcgcgccgtgtggtgcgcatggccagcgaagacatcggcaatgccgacccgcgcgccctgagcctgtgcctcgccgcgtgggaagtgcaggagcgcctcggcagcccggaaggcgagctggcggtggcccaggccattacgtatctggcctgtgcgccgaagagcaacgcggtgtacatgggcttcaagtccgcactgcgcgcggccgccgaacacggttcgctggaagtgccactgcacctgcgcaatgcgccgaccaagttgatgaaacaactgggctacggtgatgaataccgctatgcccacgatgagccggacgcctatgccgccggtgaagactactttcccgatgaccttgagccgcagccgttctaccagccggtgccccgtgggctggagctgaagattggtgaaaagctcaatcacctcgcccaactcgatcgcctcagccccaaacagcggagaaagtagtgctcaagaccattcttgccgtgtccgtagccggcatcgctggtacattattgcgtttcgccaccggtacatgggtcagcgccaattggccgaagcatttttatgcggcgaccctggcggtcaacctggtgggctgtctgatcatcggcttgctgtacggctggttcctgttgcgcccggaagtgccgattgaaattcgtgccggcttgattgtcggttttgtaggcggtctgacgaccttttcatccttttcactggatacgttgcgcctgctcgaaagcgggcaagccctggtagctttcggttatctgggcatcagcgtgttcggcgggctgctcgccacctgggctggcctgtccttgaccaaactttgataaacgagagaccgacatgctcgattccaaactgttacgtagcaaccttcaggacgtagcggaccgcctggcttcccgtggctttgccctggatgtcgcgcgcatcgaagcgctggaagaacagcgcaagaccgtccagacccgcaccgaagcactgcaggctgagcgcaatgcacgttccaaatccatcggtcaggccaagcagcgcggcgaagacatcgcgccgttgatggccgacgtcgagcgcatgggcaccgagctgtccgagggtaaggtcgagctggacaagatccagaccgagctggactcgatcctgctgggcattcccaacatcccgcacgaatccgtgccggtgggtgcagacgaagacggtaacgtcgaagtgcgccgctggggcacgccaaccgcctttgatttcgagatcaaggaccacgttgccctgggcgaattgaccggcggcctggatttcgaaaccgctgcgaaaatgtccggcgcccgctttgccttgctgcgtggcccgattgcgcgcatgcaccgtgccctggcgcagttcatgatcaacctgcacaccggcgagcacggttacgaagaggcttacaccccgtatctggtgcaggcgccggcgctgatgggcaccagccagctgccgaagttcgaagaagacctgttcaagatcagccgcgacggcgaagccgacctttacctgatcccgacggccgaagtgtcgctgaccaatatcgtggcgggcgaaatcctcgacgccaagcaactgccgatcaagttcgtggcccacagcccgtgcttccgcagtgaagctggcgcgtcggggcgtgacacccgcggcatgatccgccagcaccagttcgacaaggtcgaaatggtgcaagtggttgagccgtcgacctcgatggaagccctggagggcctgaccgccaacgccgagcgcgttctgcaactgctggaactgccgtaccgcgtcttggcgctgtgcaccggcgacatggggttcagtgctgtgaagacttacgacctcgaagtgtgggtgccgagccaggacaaataccgcgagatttcgtcgtgctccaactgcggtgatttccaggcccgtcgcatgcaggcgcgtttccgtaacccggaaaccggcaagccggaactggtgcacaccctcaacggttccggcctggccgtgggccgtaccctggtagctgtgctggaaaactaccagcaggccgacggttcgatccgtgtgccggaagtgctcaagccttacatggcgggcgttgaggtcatcggctaaatggaatttctgccgctgtttcataacctgcgcggcagtcgtgtgttggtcgtcggtggcggggagattgccttgcgcaaatcccggctgctggccgacgccggtgcgttgctgcgggtggttgctccccagattgaagaccaattgcgtgagttggtgcagggcagtggcggggaactgattgtgcgcggttatcaggaggcggacctcgacggttgcaccctgatcatcgcggccaccgatgacgagccactgaatgcgcaggtgtccgccgatgccaagcgtcgttgcgtgcccgtcaacgtggtggatgcgcctgccttgtgcagcgtgatctttccggcgattgtcgaccgttcacccctggtgattgcagtgtccagcggcggcgatgcgccggtgctggcgcgcttgatccgggccaagctggaaacttggattccgtccacttacggtcaactggccggtttggcggcgcgttttcgtgcccaggtcaaaagcctgtacccggatgtgcagcagcgccgggcattctgggaagatgttttccagggcccgattgctgaccgccaactggccgggcagggtgctgaagctgagcgtctgttgatcgaaaaggtcaacggtgcaccgccggatgcgccgggcgaagtctacttggtgggcgcaggcccgggtgatcccgacctgctgaccttccgtgcgctgcgcttgatgcagcaggccgatgtggtgctgtacgaccgcttggtcgcccccgcgatcctcgaactgtgccgccgcgacgccgagcgtgtctacgtcggcaaacgccgcgccgatcacgccgtgccgcaggatcagatcaaccagcaattggtggacctggccaagcaaggcaagcgcgtgctgcgcctcaagggtggcgacccgttcatctttgggcggggtggtgaagaaatcgaagaactggcggcccatggcattcctttccaggtggtgcccgggatcacggcggccagtggttgcgcggcgtatgccggcattccgctgactcaccgcgactatgcgcagtcggtgcgcttcatcaccggccatttgaaggacgggacttcggacctgccctggcatgacctggtggggccttcgcagaccctggtgttctacatggggttgatcggtttgccgatcatctgcgaacagttgatcaagcatgggcgtgcatcggataccccagcggcgttgatccagcagggcaccacgtccaaccagcgtgtattcaccggcaccctggcggatttaccgcgcatggtggcggagcatgaagtgcatgcgccaaccttggtgatcgtcggtgaggtggtggtgttgcgcgagaagctcaagtggtttgaaggcgcgcagtcccaagtctgacactgcacctgtggcgagggagcttgctcccgctgggctgcgcagcggccccaaaatcctgggagtgcttcgcactccagcgggagcaagctccctcgccacaaggtgtttttagctcaagacgccgttgccggccaggcgctggcgatcatgggcagtctcaaactcctgcaacggccccttgggcacaatgcccgtagggttgatcgtgcggtggctcgcatagtaatgccctttgatatgcgcaaaatccaccgtctcggccacgcccggccactgatacaactcccgtagccaattcgacaagttcggataatcggcaatcctgcgcaggttgcatttgaagtggctgtaatacaccgcatcaaagcgaatcagcgtggtgaacaggcgcacgtcggcttcggtcaggtattcaccggccaggtaccgatgtttgcccagatgctgttccaggtgatccagctcggcaaacacgtcatcaaacgcactgtcataggcctgctgtgacgtggcgaagcctgcgcggtatacgccgttgttcacggcggggtaaatgcgctcgttcaaggcgtcgatggtcgggcgcagtgtttcggggtagaaatccagtgtgttgccggtcagcccgttaaacgcactgttgaacatgcggatgatctctgccgactcattgctcacaatgcgtttgagctttttatcccacagcacaggcacggtgacgcgcccggtgtagtcgactgtgtcggcagtgtagcgctggtgcatgaagtcgaaatcatccagcttgtcgccggtcgagccgtgggccttgtcgaatgtccagccgttttccagcatcagccaactgaccacggacacgtcgataagactttccaggcccttgagcttgcgcaggatcagagtgcgatgggcccacgggcaggcaagggagacgtagaggtgataacggccggcttcagccttgaagccgccttcgccactcgggccaggtgcgccgtcggcggtcacccagttccggcgttgcgcctgctcccgttggaatgcgccgtctgcgctactttcgtaccactggtctttccagtgtccttcgatcagcaaacccatgactggctccttggctaataaacgttggaggccagtctaaagggctgagttcgatttaaaagcgcaaagaccgggcgctaatgatcgatcaaatcgatttgtcccgtgcgtcccagtattgctcggccatgacgaacgcctgttcccgtgaatggccaaggccgcgcaaggccagggccatggtcgcaatcaaagccagttgcgggtaactgtcttcgacatcaccgcgccacagcgctttcaaatgttcaggctcaaggctggccggcttgacgtggcgttgcgcggagagggcgggccattcttcatcccagctttcgccgccggtggtgccatacaggtggctggcggagtcggggttgatctcgatctcgccgccatcgcccttgaccacaatcacattgtcgcccagcaggccactggcatcgcggtgtacgccctgatagcccggatggaaaatgctttgcaggccaaggcgtgcgttcaatgggttgagcaggcgcgccagtgaatggatgggcgagcgcagacccaaggtgttacgtaaatcgatcatgcgttgcagttgcggtgcccagtcgcccagcgggataaacgccaggttgccctgtgcataggccgcttcgacttgctgccaattgcgacacagcggaatctgcaagccttccagcaattgctcggtgtacagccgcccggccgtgtgtgcgccaccgccgtgcatgaggatgcgcacgccgttttgccccaggcatttggccgccagcaaataccaaggcaggtggcgttttttaccggcgtaggttggccaatctatatccacgttcaacgccggggcgttcaggcgctggcgcacggcctcggtgaagcccgcgagttcttccgggctttcttccttgtggcgcagcagcatcaggaaggcaccgagctgggtgtcttcgactttttcgtcgagcagcatgcccatggcttcgcgggcttcctcgcgggtgaggttgcgcgcgccgcgcttgcctttgcccagaatgcgcacgaacggcgcaaacgggtgctcggcaggggtttcaagggtcagtggggcaaagtcggtcataagcaattcgtcggcctgggcaggcccgccagcttggcggcgagtttggcgggagtgccgttgaacaatttgttgaggtgcaggctgttgcccttttccgggcccagcttcaaggcggtgtacttgatcagcgggcgcgtggcgggggacagctggaattcggcatagaagccgcgcagcagctcgaggatttcccagtggtcggcggtcaactccaggggctcggcggcagccagggcgtgggcgacctcggtagaccattggtccaggtcaacgaggtaaccgtccttgtccagttcgagggtgcgcgcgcctacggtcagggtgttcatagccagctgttgaccttgtcgtagtcgagcgacagctgcacaaaaccggcgtagtccacgctgtcggcccagtccggcaggcacacgctgcgcgcctgcatgtcttcagccagtacaaagacttttacacctttggtttgcaaggccgggttatgcaacccataagcaccgtcgccgcacagcaggatggcgtcattggcgccacacacgcgaaggcagctggcgaagcggctgtcggtaaagggggagtgggacaccacatgtaaagtcgacatcagagggtcaccacctggtcgtaacggtcaatcagcgtgcagatgccttcgctgttcagcggttgggcgctgctcggggccaccagcccgcgttcgtcgaggctgtggcggcaggcgaatacgtcttcaacgccaaacagttccagggcctgcaggttggcgctgaggtctttttgctgcacggccttggcgtcctggtgaggggcgagttggaacaccccgtcatccatgaacagcaggccaatgggcaggtcgaacgcgccaccggccagcacgatatccagcgcttcccgtgcacccgggccggaccacggcgcctggcggcttatgaccaacaaggatttggacatgtcatggccctccaaaacagatcaggcggtcggcggcctgcacggcgtcatgcagttggcccaggcccgacaacgcccacggtgcatcgaggttgatggcgctgcgctgatagcgcgtggcttcttcgctgttgagcacgccacggcgcaaggcggcggcgatacacaccacgccgtcgagctggtgctcgctgacaaacccgtgccattggcgggcgatatcctgttcatcctgaggcgtgacgaggttattggcagcgttgtacacaccgtcctgatagaaaaacagccgcacaatctcgtgcccgccggccaacgccgcctgggcaaacagcagggcgcggcgcgaagagggcgcgtgggcggcggaaaaaactgcaatcgcaaacttcatggaacactcggcaagcaaacgtgggccaatgataaagccgccgccgcgaaaaagcccgccgtgatcaaaacggtcaccgtttgtgactgttccggcgattgccgacgggcacaaggctgcctagtctgtgggcattcgaatcagaaacggagtctccatgtcaggccccttggcgtccctcaaagtgctggatttctccaccttgctgcctggcccgtttgcgtccctgatgcttgcggacatgggcgccgaggtgctgcgtatcgaatcgccggcgcgcctggaccttctgcgggtgttgccgccccatgaccggggcacgtcggccagccatgcctacctcaatcgcaacaagcgcagcctggccctggacctcaagagggccgaggcgctggagatcgtgtatgagttggtgaagggctatgacatcgttcttgagcaattccgccccggcgtgatggagcgcctgggcctggggtatgaggcgctgaaggcgatcaaccccaggctgatttatgtgtcgatcaccggctacggccagaccggcccctacaaggatcgcgccgggcacgacatcaattacctggcgctggccggtgtggccagccacaccgggcgccaggacagcgggcctttgccgcttggcgtgcaattggccgacgtgggcggtggctcgctgcacgcagtggtcgggttgctcgcggcggtcatttcgcggcagcaaagcggggtcgggcaatacctggatgtgagcatgactgactgctctttcagcctgaacgccatggcgggcgcgggttacctggcgtgtggcgtggagccggaacgggaaacccatgtgctcaatggcggcagtttttacgattattaccgcacgcgggatgggcgctggatgtcggtgggcagcctggagccggcgttcatgcaacagctctgcgcggcgctggggaagccggagttggcggcgctgggtttgtcaccccaactcaagggggcgctgcaagttgaatttgagaagcgcagctttgatgaattgtgcgagcttttcgccggggtggatgcatgcgtggaaccggtgctgagcctgagtgaggccttggaccatccacagctcaaggcgcgggacctggtcagccaagtgccttggggcgatgggtcgacccaggcacaactggcctgcccgttgaaattttccgagggtttgccgccgcctcggcatgtgggggccgaggtgggcgcgcacagtgatgaagtgctcgcggagttggggtttagtgttcagcgaattgcaaatttgcggcaggctagagtagtgggatgactgatcgggcgctatcgcgggcaagcccgctcccacatttggagtgcattccactctgggagctggcttgcctgcggtgaggcccttattccacccgagtttccccggtaaacaccaacgtctgccggcaccgccgacacaagtaccgccgcccctgggccacgagcccatgacgctgggacgaaaacggaaaatcactgtctgcgcacgggcagcggtaaatatagcgggtcacctgccggcgcttcacttcataggtatggcagcgatccggcggcagttcgtaaaccccgcgcatgatcaattgccattcctcgccgtgaggctggatacgctcgccaaacaattggtgggcaatcagatgcgccacttcatgagccacggtctgtttcaggaagtgctggctgttttcacggtacaactgtgggttgaagcgcagcaggttctcgtgcaaatgcgcgacaccggccttctggccccgcagcttgaggctgacctgggggcgtttgaagcttcgtttaaaaaaggattctgcttgcaggaaacaatcttcgacgcgggtattgagttgctcgggcatgctgtacatatctccagagaacaccagtatgccgcaaagctgagtgtttccgaatctgtcaggcgccgaatggtcatgcataatgcacaaagccaccttgcggtggccttgcctgtgattttgagtgacctagttggtgtagatcgggcctacgccgagtccccagacgatcaccgtaaacgccatgatcgccaccagaacgacgagccctaccgccagcactgagctggaaaacaggaaaccctcgtccgggtcgatgttcatgaaggtgggcagccccacatacagcaggtacaccgtgtaacagatggctgccgtacccaccaccatgcccagccacatatgtgggtagagcgccgagagcccgccgataaacagcggtgtggctgtataggtggcaaacgccacgcaacgcgccatgcttgggttagcgtcgtaggtgcgggccatccagtgaatgaacgcgcccatgaccgccacaccgccgagcatggcgatataggacatcagggtcatccacaacgcactttcctgggtcaacatcaccggcgcacggctgccgatgacccaacccacccgggtggtgccgataaaggctgaaacggcggggatcgccgcgagaatcaaggtgtgagtgaggtacatgtggccgatgctttcttccttatcgccacgaatttcccgccactccctgtcgggatgagtaaagagccccacgacgtgatggatcatgccagtcactcctgtcgttattaccatcgccccccgtcggagcgcccaccggccagttggcctgaaaggtctggagatatgtgcgacctcaagtcgcagtataggaagtgatgacctgaaaaactgtagggctttagagcaaattgcgctgtaaacatgggctctaatcgcggtgaggtctgtcagggttgcactcgatccaggtgggagctggcaagccagctcccacaatggaactcaggcgctcataacgctaaaatgctgcgcttttcgtcacacacctctagcggatccaagcgccatgggcactcttaccgtcaaccagaacaaactgcaaaaacgcctgcgtcgcctggccggtgaagcggtcgccgatttcaacatgatcgaggacggcgacaaggtcatggtctgcctctccggcggcaaagacagttacacgatgctcgatgtgctgctgcacctgcaaaaggtcgcgccgatcaagttcgagatcgttgccgtcaatatggaccagaaacaaccgggcttccccgaacatgtgctgccggcctatctcaaagagctgggcgtggactaccacatcgttgaaaaagacacctattcggtggtcaaggagctgatcccggaaggcaagaccacgtgctcgctgtgctcacgcctgcgtcgcggcacgctctacacctttgccgatgagatcggcgccaccaagatggcgttggggcaccaccgcgacgacatcgtcgaaaccttcttcctcaacatgttcttcaacggctccctcaaagccatgccgcccaagctgcgcgccgatgatggccgcaacgtggtgatccgcccgctggcgtattgcaacgagaaggacatccaggcctactccgacttcaagcagtttccgatcattccgtgcaacctgtgtggctcccaggaaaacctgcagcgccaggtggtcaaggaaatgctggtggactgggagcgcaagacgccgggccgtaccgaaagcattttccgcgcgttgcagaatgtacaaccgtcgcaactggcggaccgcaacctgtttgatttcacagggctcaagatcgacgagaacgctgcttcgcgcttcgtcaatgtagtgaacctctaagcgatttccacgctctgacacacggcgcttgcgggcgccgttttcaattcaattttttgggagagggcatgcgcgattacaagtggttgcacgaattttgtctgaaccgcttcggctcggctgcggaattgaacgcccacctgccggtacccaagaccccggcgcagttgcgcaaaatcagcgatgaccgttacctgtcgaccttggcgctgcgggtatttcgcgcaggtttgaaacacagtgtggtggatgccaagtggccggctttcgagcaggtattctttggctttgatccggaaaaagtcgtgctgatgggcgccgagcacctggagcggctgatgcaggacacgcgcatcattcgccacctgggcaagctcaagagtgtgccgcgcaatgcgcagatgattctggatatcgagcaggagaaaggcagcttcggcgcgtttatcgctgactggccggtaaccgatatcgtcgggctgtggaagtacctgagcaagcacggccaccagttgggcgggctgtcggccccgcgtttcctgcggatggtgggcaaggatacctttgtgccgagtgatgacgtggtggcggcgttgaatgcgcagaaaatcgtcgacaaggcgccgaccagcctgcgcgatctggcgattgtgcaggaggcgttcaaccaatggcatgccgagagtgggcggccgatgtgccaactgtcgatgatgttggcgtacacggtgaatcattgaggttgaggtgatgccatcgcaggcaagccagctcccacattcgaccgcattccttcaattgaaatgcaatcaaatgtgggagcgggcttgcccgcgaaggctgcctgacaggcactacagctctatcaggcctcagcaagccgccgattgagctgatgccgccagcgcacatacagcagcgccgtacaaaacaccgccaggctcgccagcatctccaataccccgaaccactgccggttcgggtcatacgccgccagggcgcccttgatgaaatacaggttcaccacgaagcacatccacgagtgcccgcgtgcgctgcccagcaacatgcctggcgccagtatcaacaacggcaccagttcgatcagcaggattacccacgggcgcgcgccgtgcagatcggcgacgaacaggtaatagccgcacagcaaccccaccagacccaggaacgccagcaggctcagcgcccgtgcgaccttgacccttggcgccagccacgcctggggtggcaggaccttaggcttcctggccacggccgttctccagcaggattgcggtttttgccaggcgcaggcccagtgcccggcacagggtgatttcatgttggtcgagcatgcgcttgccgtccggcccggagtggtggctggcaccgtatggcgtgccgccgccctgggtgtcgagcaaggcctgttcgctgtagggcaggccggtgatcagcatgccgtggtgcaacaacggcagcagcatcgacatcaacgtggtttcctggccgccgtgcaggctggcggtggaggtgaacacgcccgccggtttaccgacgagcgcgccggtcagccacaggttgctggtgccgtcgaggaagtatttgagcggcgcggccatgttgccgaaacgtgtggggctgccgagggccaggcccgcgcagtttttcaggtcatcgaggctggcgtacagcgcgccttcgtccgggatgcccggcgccacggcttcgcactcggcggagattgccggcacggtgcgcaggcgcgcttccagcccggcctgctcgatgccccgggcaatctgccgggccatttcgctgacggagccattgcggctgtaatacagcaccagcacatagggcgtactcacggcagaatctccagcacgttctccggcgggcggccaatgatggctttgtcggctgtttccagaatcgggcgctccatcagcttgggatgttcagcgatggcggcgatgagttgcgcttcgctgaggccggcgtcggccaggttgagggctttgtattcgtcttcgccggtgcgcagcagttggcgtgcgccgatgccgagcttgccgagcagggcctttatttgcgcggcgtccagcggggtttccaggtagcgcaccaccgtcggggtgaggccacgggcttcgagcagttccagcgcaccgcgggatttcgagcagcgcgggttgtgataaagcgtcagatcggtcatgtgcgggtcgcatcttgcgtaaggtggcgggtattctacccgggctgtggcgcgtccttaaaccgtaagaggcgataggtcgcagccaatgttcatttttacgaaggattaccccatgacaaggcgactgatcggtgcattggcgatcatcacaaccctgctgctcagcggctgcggtaacgattacggcgttgaccaatatggcaagaaagtggcggccgagcgcttggacaaacagtgggtggtggtcaactactgggccgaatggtgtggcccgtgccgcacggaaatcccggaactcaatgccctggccgagcagctgaaaggccagaacgtgggggtgttcggggtcaatttcgataacgtgcagggtgaagaactcaaggccgccagcgagaagctggggatcaagttcaccgtgctggcgcagaacccggaagagattttcgacattccgcgcagcgaggcgttgccggtgacctacatcatcgatgacaagggcaaagtgcgggagcagttgatgggtgagcagacggcgcaaggggtgttggccaagctcaaggccttgcgcggttgaacctgtgagggctggcttgtgtgggagctggcttgcctgcgatgctgctgactcggtgtgtcaggtaagtcgcagtgatgccatcgcaggcaagccagctcccacagaaaagccagtccggccttaggctgtctcagccttcttcaagccacaggcgaatcggcttgccttcggccggccagaaacgcgcctgttcgatcggcgagatgtcccagcgctcgacgccctgcagcgcctggaagaaacggtgttcctgctccatcaaggcttcggcacagagtttgcgggtgctgccgaccttgccgaagctgagtttgtcgccttcgacggtgtagggcgcaaaccagtggttgcaaccgccgttgccataggcacggccatcggcgccgagggtgacggtcaggtgcgcgtaatccatcaaaggccgctcaccaatccactccaccacgtagctgtggtcctgctccagcttcaccgcatcacccgcgcagccggtcaggccaaccccgatggcagcgagcaaaagcgggcctttcattgcccggcctgctggcatttcgggcagcggtgcttgtcgcccgtgctggcccagcccaactccttgatgcgcgcgttggcggcgggttgcaacggctctttgctcagcttggtttccaccgcgaattcaaactcgagcacggtggcgcagctgtcgcagttgaccttccaggtgtgaatctccaattcgccgaatttcggcccttgggccatggcgacccactggcctgccgggcggatggagtagcgcgcatcaccttcaacggtcagacgcatcgacagggttttactgccgcgcagggtgacgatcagtacgtcgccatgcttgatcgaaccaccgttgccggtgatctggtaacggcccggcaccagggcgcggcattcgatcagggtgtgttgcgggctcagcaagctgaagcggaaatcgtgttcggccatggatcctccaaataggcgcggcatcctatcacgggtgccggctcatcatgagccctgtatgtgaccgctgatcatccttcgacaaggttctgcggctggcccccggcccacgcggcaatgttggccagggtggtgccggcgatggcggccagggcttcgcgggtgaggaaggcctggtgcgccgtgatgatcacattggggaaggtcagcaggcgtgcgagcacatcgtcctgcaatggcaggtcggagcgatcctcgaaaaacagctgcgcttcttcctcatagacatccagccccaggtagccgagctggccctcctttagcgcttcgatcagtgccggcgtgtcgaccagcccgccgcgcccggtgttgatcagcattgcgccgcgctgcatgtgggccagggagcgggcgttgatcaggtgcttgctatcggcggtcagcgggcagtgcaggctgatgatctgcgcctgggccagcagttccggcaggcttacgtaatgcgcaccaagcgcctggacctgcgggttggggaaggggtcgtaagcaagcaactggcagccgaaaccggccatgattttggcgaacgtggcgccgatctgcccggtgccgaccacgccgacggttttgccgaccagatcgaaaccggtgagcccatgcaggctcaaatcgccgtcacgggtgcggttataggcgcggtgcaggcgccggttgagggccaggatcagcgcgacggcgtgttcggccaccgcgtgcggcgagtaggccggcacgcgcacgatggccaggcccaggcgcttggcgacggccaggtcaacatggttgtaacccgccgagcgcaaggcgatcaggcgcgtgccgcctttggccaattgctccagcaccggcgcgctgaggtcatcgttgataaaggcgcagaccacttcgtggtgttcggccagggctgcggtgtcgaggttcagccgggcgggctggaattgcagcgctacgccttcgggcagttgctcgccgagaaagctgtcgcggtcgtaggtttggctgctgaaaagaatgacgcgcatcaaaaagctccctgcacttactgaaataatcacataacccctgtgggagctggcttgcctgcgatgcaggcaactcggtacatcaggcatacccgggtgatgccatcgcaggcaagccagctcccacagaaaagccagctcctacagaaaagctaggcgttgacccgggcttcgctggccagccgggcaatcgccatgtccagctcgtccagcgcagcaatggccttggcgtcgtcctgcttgagcagggtttccgcgcgctggcaggcggcgcgcagttgcggtacgccgcagtagcgggtggcgccgtgcaagcggtggacgcgttcgatcagcgcattgttgtccttggcttcgcgggcgacagtaatcgccgagcggtcggcctcaagggacgccagcaacatggcgagcatgtcggcagccaggtcggctttgttggcggccaggcgcaggccttcctcgtggtcgagcaccagcaattgcacgccgggccccaggttgtcgttgctgcgttccgggccttggttacgcagggccagaccggtccatttcaacaccacctgggccagttgccgttcgctgatcggtttggtcaggtagtcatccatgccgctttgcagcaaggcgcgtttttcgttggccatggcgtgggcggtgagggcgaccaccggcagcggcgtgccgtggcgctcgctttcccattggcggatggcttcggtactttggcggccgtccatgccgggcatttgcacatccatgagcaccaggtcgaaggtctcctgcttcaccgcgtcgatggcggcatagccgctttccacggcatgcaccttggcgcccatgtcttcaagcagggtttgcaccagcagcaggttggccgggttgtcgtccacgcacagcacgcgcggtgcccggctggacagcggttcgccgggctcgctgcgcaacgggcgcgggctgatcaggtcggccagcgcgcggcgcagcttgcgtgtacacgccggtttggcctgcaactggctgttggggttgggcaccgactggttgaagagcatctgctcggtggtcgggcacagcaccaatactttgcagcccaggtgttccaggtcccacaggtgctggttgagacgttcgggcggaatgtcgttggccgtcacgccgagtaccgccaggtcaatcgcctgttcggtctggtgggcgctggtgatgccgttggtcaggctttcgagggtgttgaacggggtgacttccaggccgcagtcttcgagctgatgttgcagggcctggcgcgccagttcgtggttttccagcaccgccacacgacggccgagcaacggcgccgagggcagatcgtcaacgtcgtcgcgggttttgggcaggctcaggctgatccagaattccgagccttcgcccggcgtgctgtcgacgccgatctcgccgcccatctgctcgatcaaacgcttggagatgaccaaccccaggccggtgccaccaggctgacgcgacagcgagttgtctgcctggctgaaggcctggaacagtgcacgtacgtcctggttggacaggcctatgccggtgtcttgcacactgatgcgcaattgaacgctgtcttcttcttcgtcctcaaccattgcccgggccacgatggtgccctcgcgggtgaacttgatcgcgttgctgatcaggttggtcaggatctgcttgaggcgcagcgggtcgcccaccagcgccagcggcgtgtcacggtacaccaggctgaccagctcgagctgcttggcatgggcggcgggggcgaggatggtcagggtgtcttggagcaaatcgcgcaggttgaagggcacgctgtcgagcaccagtttgccggcttcgattttcgagaaatccagaatttcgttgatgatgccgagcaggttgtcggcggacttttcgatggtgcccaggtaatccagctggcgcggtgacagttcgctcttttgcagcaaatgagtgaaaccgaggatgccgttgagcggcgtgcggatttcatggctcatgttggccaggaattccgacttgatgcggctggcctccagggcctccttgcgcgccaggtcgagttcgatgttctggatttcaatggtttccaggttctggcgcacgtcttcggtggcctggtcgatgctgtgttgcagttcttcttgtgcgttctgcagggtttcggccatgcggttgatgcccgaggccaattggtccagctcctggctgccgagtgggggcaggcgggtttccaggttgccgtccttgagctgcgccacggcttgtttgatctggccaatcggcgagttgatggtgcggctgatgcgcagcgccagagcggcggtgcagatcaggccgatggcgatcaacagcaggctggcgaacaggctgcggtagccgcgcagcaacatgccgttgtgggaaagctccacctcaacccagcccagcaggcggtcggcttcgtcgggaatcagttcgccggcgaggttgcggtggcggccgaataccggcagcaagtagcgcgtggcgtcattgccggtgcgttgcagcagatgcgagctgttgcccacgggcggttggttgagcatggtcgggcccgcgtgggcgaggggcgagcggtccggcgcaaggaaagacacggcgcgtacgtccggttgttccagggattgggtggcgatgcgttcgagcaagtcggtgttcttggtgctcagggcaggggccaccagtggcgccaactgctcggcaatcatttcgccgcgttgcagcaactgggtctgcaactccgagagttgcatccaggtgaaatagcccaccaacaacagggccatcaggctggtcggtaataaggtcagcaacagtacgcggccttttatccccattcttctaagcacgccactctcctgctaccacattgttatcaaagatccgcgcgggcatccggcccgcgccacctgcgcagtgtagccatttgcgcggtgtggaatcttgcaaattaatgacacgcggcaatcttccgagcccttggccgccggctggcgattgcctggcagagtttaatcttgaataatcagccattgagaatgacttgcagacgctaatgaatcccgcagtagttggcctacccagtatcctgaccatcgaagacgaccccgtgctgggcgcctatgtccacgagcacctgggccgttgcggctttgaggtcacctggtgccagaacggtcagcagggcctgcaaatggcccgtgaccaggcattcgacgtggtgttgatggatatcctgttacccgggcttgatggtttatcgattctgactcacctgcgccgcagccattcgattccggtgatcctgatgtcggccctgggcgctgaagcggatcgtgtcagcggctttcgcctcggcgctgatgactacctgcccaagccattcagcatgatcgagttgcgtgtgcgcattgaagccatcctgcgccgcgtggccctggaccggcggccattgcccactcgtctgccggctcgcgacgactcgcgcgcgctgcgtttggacgatgagctgtgcgatgtgttctatcacgagcactgggccgggctgacgcgcagcgaataccgcttgctggaaaccctgcaccgcaatacggacgaagtcctcagcaaggcctttctttatcagcatgtgttgcagcgcggctatgccgcccatgaccgcagcctcgacatgcacatcagccagattcgccgcaagctcaaggccattggctacacagcgcgcgaggtgcgcacggtgtggggcaagggttatgtgctgagcggtcatgatgaagggctttgagcggctgcccggcaggcactcgttgttctggaagctggcgtgcctgctgatcgccttctgtttgctgatgatctggctcagttggtcctggggccggtacatggaggagcagaatgcctatctctccgaggagtcccgggaaatcctgcggggctacgccgccggggccgaactggcgtggaatacccagggcagcgccggggtggacgcatggctgcacctgatgacccggcgggaaaccacttgggtcggcgtgattggcaatgacctgcaatcgctcagcagtgcgccgctgagcgacaaggaaagccagcgcctgacgttcctgcgggggctggagtggccggtcagccggcattccaagggcttgccgtggctgaaaattccgtttcccatggacccgagcgacggttcgctggtcatcgagctgccgaaacgttttatgccggggcgctatcagttgttttggcggatggtgaccaacggtgtgattcctggtttgttcaccttgtttttgtgtatcggcctttatcggctgctgatcatgccgctcaaccaactgcgcgaacaggccaatgcctggcgggccgaccagctcaacgcgcgcatgtcccgcgaggccaccagccgcaaggacgagttgggcgagctgggccgggcgtttgaccacatgtccgagcgcttgcaaggcacggtggtattgcagcaacagctgctgcgcgatatgtcccatgagctgcgcacgcccctgagccgcttgcgggtagcctgcgacagcgagcaagacctcgcgcaattgcgtgagcggctgggccgcgaagtcgatgcgatgcagcgtctggtcgaagacagcctgcaactggcctggctcgacagcgagcgtgcgccgttgcccaacgaagatattcaggtgcaggccctgtgggacatgctgcgggaaaacgcttgttttgaaagtgattggccggcgtcgcgcctgccttgcctgttaccggccgattgctgggtgcgcggtaacctgaatgcgctggcccaggccctggaaaatatcctgcgcaatgccattcgccattcgcctgcgcgcggtttggtgaagctcgatgggcgtcgtgaaggtgatgactggcatctgtggctggaggatcagggcggcggcattgatgaacaggacctggagcgcatcttcgcgccgtttacccgccttgaaggttcacggcccgggcacggtggtttcggcctgggcttgagtatcgcccgtaacgccgttgaacgtcagggtggccgcttgtgggcggaaaacaccgggcagggcctgcgtgtgcatctgcaattgctggcgcgttagtttcaggcgcggcgctgcttgcgctttttccattggtgcgcgacccaccagcgccagtaacccatggtcaagcaataggcgagtgcgcccagcaccagccccaataccacagagcccagcaggaacggctgccacagcgtgctcaactggccgctgatccactcccaggtcaagttgtcgggcaggctgcggggcggcacgttcatcagccacgcaccggtcatgtaggtgcagatgaacaccaccggcatggtgatcggattggtcagccagaccaggctcacggcgatgggcatattgccgcgcaccgcaattgccagcaccgccgccaatagcatctggagtgggatcggtataaaggccgcgaacaaacccaccgccatggcgcgcgcgacggagtgccggttcaggtgccagaggttggggtcatgcagcaacgtgccgagaaactgtaatgacttgtgttccctgatactgctgggatcgggcatgtaccgtttgaataagcgccggggcataaggggtccaggtcagttcgaggggcaagtatgcccgcattctataaacagaaaattcagactttgtgacaaaacatcataggccgcgtttgacgttcggctaagactgagtgaatcaccgcaaaaggatgattcatgagaacagggatgttcgcgttcggacttggcttgctttcactgcgatttttacccgcactgccgccaaccggctggatgctggcgatgccggtcatggcattgatgctgttgccttggcgtacctacccgctggcgtttttcctgctgggcttgagttgggcctgtgtgagtgcgcaatcggcgctggatgatcgactcagccccacgctggacgggcacactcgctgggtggaagggagtgtggtcgggttgccgcagcacacggagaccggcacgcgctttgaattggccgacggccggtcacgccacgcccggttgccggcgcgcatccgggtgtcgtggcatggcggcccgcgggttcaaagtggtgagcgttggcgtatggcgctgaccctcaaacggccatccggcttacttaactttcatgggtttgactatgaagcctggctgctttcgcaacgcatcggtgctacggcctcggtgaaggatggcgagcgcctggcgcccgcccgccatgcctggcgcgatccggttcgtcagcgactgatggcggtgaatgcgcaaggccgtgaagcagcggtggcggcactggtgctgggcgatggctcgggcctggccgctgatgactggcaagtcttgcaagacaccggcaccgtgcacctgctggttatttccggccagcacatcgggttgctggcggggctgatctacggtctggtcgcaggcttggcgcgctacggctgctggccccgcgccttgccctggctgccttgggcgtgtggcctcgcatttgctgcagcgctgggctacgggttgctggccgggtttggcgttccggtgcagcgggcactcgtgatggtcgggctggtgttgctctggcgtttgcgctttcggcacctgggtgtatggctgccgctgttgctggcgctcaacgccgtgttggtactggaacccttggccagtttgcagccggggttctggctgtcgttcgcggcagtggcggtgctggtgctggccttcggcgggcgcttggggccctggagtgtctggcaggtctggacccggccacagtggctgatcgcgattggcctgtttccggttttactggtgctggggttgccgatcagtctcagtgcgccggtggccaatctgtttgccgtgccctggatcagcctggtggtgctgccattggctttgctggggactgcgttgctggcagtgccgtgggtaggcgagggcctgttgtggctggccggtggggcgctgggctggctgttcagcgtgctgacgcttttggccgggcaattgccggcctgggttccggccgaagtgccattgggttattggctggtcagcgtggcgggtgcggtgttattactgctgccaaagggcgtaccgtttcggttgttgggttggccgatgctgttgctcgccatcttcccgcccagggagcaggttccccatgggcaggttgaggtggtgcaactggatgtcggccagggccaggcagtgattgtgcgcacacgccagcatacattgctgtacgacgcggggcctcgctcgggtacggttgatcaaggcgcgcgcgtggtattgccagcgttgaaaaagctcggggtcggggcactggacatgatggtgctcagccatgcccacgccgaccatgccggtggtgcagtggccgttgctcgcgggttgccggtcaggcgggtcatcggcggggagaccgaaggcttgcctgcgctcctcggcactcaagggtgcagcagtggcgagcggtgggcgtgggatggcgtgttctttgagctgtggcaatggcctggcgctaccagcagcaatcccaagtcctgcgtactgcaggttcaagccaatggcgaacgcctgctgctgacgggcgacattgatcgcgccgccgaacaggctttcatcgggtcgccgctggcaacccgcaccgattggctgcaagcgccacaccacggcagccgcagctcttcatccgaagcctttgtgcaacggcttgcgcctggggcggtgttgatttcccgtgggcgtggcaatgcattcggtcatccgcatccgcaagtgatggcgcgttatcaggcaatgggcagccgggtgtacgacagtgccgaacacggcgcggtgcgcttgcaattgggcaccttccagcccccggtcgttgcgcgcagtcaacggcgtttctggcgtgaggcgttaccttggtccagcgtcaccagcggccagggcccgcgacaagtgggcctgcggcgggcgaaccccgcgactgaacctatatggtaaagtggcgcactttttcgaggggacattcactgtgtgggaattggtcaaatccggcggctggatgatgttgccgatcatcttgagctccatcgccgcactcggcatcgtcgccgaacgcctttggaccctgcgcgccagccgcatcacgcctgactatctgctggggcaggtctggagttggatcaagaacaagcagttggacaagcaaaagctcaaggagctgcgcgccaactcgcccctgggtgaaatccttgccgcgggcctggccaactccaagcatggccgcgagatcatgaaagagtgcattgaagaggctgccgcccgggtcatccatgaaatggagcgctacatcaatgcgctgggcaccatcgccgccatggcacccttgctcggtttgctgggcactgtgctgggtatgatcgacattttcagctcgttcatgggctcgggcatgaccaccaacgccgccgtgctggcggggggtatttccaaggcgctgatcaccacggcggcgggcttgatggtcggtattccctcggtgtttttccaccgtttcctgcaacgccgcatcgatgaactggtggtcggcatggagcaggaagccatcaaattggtggaagtggtgcagggtgaccgtgacgtggatttcgtcgagggccgcgcgtgaaatttcgccgcaagagacgggaaaacgttgatatcaacctcgcgtccctgattgacgtggtgtttatcctgctgctgttttttgtcgtcaccaccacgttcacccggcaaacccaactgcgtgtcgacttaccggaggcggtcagcggctcgccggccgaagatcaggaaaccaaacaactggatatcgccatcagcgccgacggcgtgttttcggtgaataaccagttgctggagaaaaacgacctcacaggcttgatggatgccttgcagaaagaatctgccggcgacgtcaatttgccgctgtcgatcagtgctgatggcaagacccagcatcaagccgtgatcaccgcaatggatgccgccggaaaactgggcttcacccatctgcgtatgaccaccgtcgaggcggcgggccaaccctgatggccctgtccgatcgtctgctcaaggcctggtacgaaggccatcctgcgctagcgctgttgcggccgttggagtctttgtatcgccgggtggtgcagcgcaagcgcgggcgtttcctggcgggcgagggcgagatctatcaatcgccggtgccggtggtggtggtcggcaatatcacggtgggtggcactggcaagacgccattgattctgtggctgatcgagcactgccgccgcagtggtttgcgcgtcggcgtggtcagtcgcggatacggtgcaaaaccgccgcaattgccgtggcgggtcgaggccagccacagcgccgagcaggcgggtgatgagcctttgctgatcgtgcagcgctgcggcgtgcccttgatgatcgatcctgatcgcagccgcgccgttaaagcgttactggccagtgagcccctggacctgattctttctgacgacggcttgcagcattaccgcctggcccgtgaccttgaactggtactgatcgacgctgcgcgagggctgggcaaccgccggtgcctgcccgccgggccgctgcgcgagccggttgagcgcctgcagagtgtcgatgccgtgctttataacggcgccgtgtctgatcgcgaggacggcttcgcctttcgtttgatgcccacggcgttgatcaacctgagcaccggcgagcgccagccggtcgatcattttccggctggccagccggtgcacgcggtcgccggcatcggcaacccgcaacgtttcttcaatacccttgaaacgctacactggcagcctgtaccccatgtttttgccgaccacgcgccctacagtgccgaggtcttgaatttcgcgccgccactgccattggtcatgaccgagaaggacgcggtgaagtgccgcgcctttgcccggcccgactggtggtaccttgcggtggatgcggtgccatcgcctgcgtttgtcgcctggttcgacacacagctgatgcgcctgttgcccgcccgtcttttgccttgaaacgcttttttccaggaaacactcatggacaccaaactgctcgacatcctcgcttgcccgatctgcaaaggcccgctcaagctcagcgccgataaaaccgagctgatcagcaagggcgccggcctggcgtacccgatccgtgatggcattccggtaatgctcgaaagcgaagcccgcaccctgaccactgacgagcgcctggataaatgaccaccgcctttaccgttgtcattccttcgcgctttgcatcgacccgcctgccgggcaaaccgctgcaaatgatcggcaataaaccgatgatccagcgggtgtgggaacaggcctgtaaaagcagcgccgaacgggtagtggtggccacggatgatccacgcatcatcgaagcctgcaaagggtttggcgccgaagcggtgctgacccgcgaagatcacaattcgggcaccgaccgcctggcggaagtcgctacgcacctgggcctggcgcccgatgccattgtggtcaacgtacagggtgacgagccgttgatcccgccgagcgtgatcgaccaggtggccgccaacctggccgcccatggcgaagcgcgcatggcgaccctggccgagcctatcgaagacatcgacacgctgttcaacccgaacgtggtgaaagtggtcagcgacatcaacggtctggcgctgacgttcagccgctcgaccttgccttgggcgcgtgacgctttcgccaaaagtcgcgatgtattgcccgaaggcgtgccgtaccgccgtcatatcggtatttacgcctaccgcgcgggcttcctgcatgacttcgtcagttggggcccgtgctggctggaaaacactgagtccctggagcaactgcgtgccctgtggcatggcgtgcgtatccatgtgggtgatgcgctggaggcaccgcctgccggcgtcgataccccggaagaccttgagcgcgttcgtcgcctgctgggggcttgatggaggttctgtttgtctgcctgggcaatatctgccgctcgcccaccgcagagggcgtattgcgccataagctgcgcgaggcggggctggcgggccaggtggaggtggcgtctgccgggacgggcgaatggcatgtcggcaatccgccagaccggcgtagccagcgggctgcactgtcgcgcggttatgacttgtctgcccagcgtgcccggcaggtttcccgcgccgattttgcgcgctatgacctgatcctggccatggaccacagcaacctgcgaaacctcaagagcttgcagccggggcagggcaaggcggagctcgacttgttcctgcgtcgctttgaggcagaggtagacgaggtgccggacccttactacgaaggcgatcaaggctttgaacgggtcctggacctgatcgaacaagcctgtgatttattggtgatcgaattgaaggggcggctatgaccttgcacgtgctctcgcaggtatcgctcaagccgttcaacagttttggcatcgatgtgcgtgcccggctgtttgccgaggcgcacagcgacgccgatgtgcgtgaagccctggcctatgccgctgcgcaagcgctgccgctgctggtgattggcggtggcagcaatctgctcctgacccaggacatccctgcactggtgctgcgcatggcaacccagggcattcgggtactgaaggatgacggtgtgcacgtggtggtcgaggccgaagcgggcgaggcctggcatccgtttgtactgtggacactggaaaacggcttctgcggcctggaaaacctcagcctcatccccggcactgtcggcgctgcgccgatgcaaaacatcggtgcttacggtgttgagatcaaggacgtgttttgcggcctgactgcattggatcgccagaccggcgagctgcgggatttcagcctggaggcgtgcaagtttgcctaccgcgacagccttttcaagcacgaaaccgggcgctggttgattctgcgcgtacgtttcgccttgagccgggcccgtcacctgaaactcgactacggcccggtgcaacagcgcttggctgcgcagggcattaccgaggcgacgcccagtgacgtcagccgggcgatctgcagcatccgccgtgaaaagctgccagaccccgccgaactcggcaatgccggtagttttttcaagaacccgctggtgtcccacgtgttggcggctgagctacaagcactgtatccggacctggtggcgtacccgcaacccgacggccaggttaaactcgccgccggttggctgatcgacaaggccggctggaagggcttccgcgacggcgacgcaggcgtgcacaggctgcaggcactggtgctggtcaattatggcggcgccaccgggcacgatattgccaatctggcgttgcgtatccagcaggatattgccaagcggttcaaggttgagctggaaatggaacccaaccggtactgaatttcagccaataaaaatgccccgtatctttcgatacggggcattttttatgccgctaacgatcagtcatcacgacccatgatgccgaagatctgcaacaggctgatgaacaggttgtagatcgatacatacaggctgatggtcgccatgatgtagttacgctcaccgccgtggatgatggcgctggtctggaacaggatgcatacggaggagaacagcacgaaaccggcgctgatcgccaactgcaggccactgatctggaagaacatgctggcaaccactgcgcccagcaacacgaagaagcctgcggtgatgaagccactcaggaagctcatgtccttgcggctgatcagcacgtaggccgacaagccaccaaataccagggcggtcatggcaaatgccgagctgaccacttctgcgccgccagccatgcccaggtaacggttaaggatcgggccgaggataaaacccatgaaaccggtcaaggcaaacgccgacaccaggccccaggccgagtcacgcagcttgttggtcaggaagaacaggccgtagaagccgatcagcacgacaaagatgttcgggtagcgcacgtgcatctgctgagccatgaacgccatcacgccgctgaatgcgagggtaagggcgagcaggccataggtgttgcgcaacacgcggctgacttcaagctgctcagcctgcgcgttaccattcactgcgtaattctgttcgcgcatggcgacactccttcagttttgaaacgttcagtcgcaaagatcataacagacgctctgtaacaagctatggcgagtgtttgacagtgtgtttcattcgggtattatggcgcccgctgagacaggatgggctactataatcctgtgatgcaaaagggaaattggcagagtggttgaatgcaccggtcttgaaaaccggcggacgttaatagcgtctccagggttcgaatccctggtttcccgccaagatttacacaaaagccccgcgattgcggggcttttgcgtttctggggtttgatcggcgtaaagacgaaaacagcaggcgttccgaaactttcgggtaggcgttccgaaactttgcctatttagagggcttggcggtcgcgccgatcctcctgtaaaccctcttcgtgatctcctgtttgctgtgcccgagcaggaggcttgcatcaccaatatcgaggatttccgaggccgctttaggccgaatatcacgaaactgaaatccgccgatcttcgccgcaagcaacgggtctccctgatcaattgctttctgctgagccttctcccgcgctttgtcccagcgcaagcgcaacatccccttcgtcatcctcttgccgtgcttgttggtcagcaggtacttggaagcgtggtgcgcattcctctcggtaatttccctgatcaattgtccaaggctgttttcaccagcctctgtgcgcatcgagatccgcagttttaggcctgtcttgccctgcgtcaccaagaagtaatcaccctctgtatcgtcgctgcgcatgatgatcacgtcagcaggtcgctggccggtcaaatagcccaggtccatcgcttccttgagctcaggctctgccatcccgtagaccgcatcccacaccaccgcattggcataatagtcgcggggtgtctccttgttctttctgatcccctggcatgggttttcccgttcggtaaggccccactcccgcgccatgttgaatacgtgagagagcagggcgatctccctgtttgccctgaccttggccgttcgcgcgtcacggtagccagcgatattggcaggggttatagagtcgatgggcgcgctgtcgaaggtgggtcgtagctgttttagctcggccaggttgtctttctgggtgcgctcgccctttttcggaatgacgtcacgctcatatctgtcgaagattcccttcatcgtggtcaggtcggctggtttttccttcgcttctagctctgcccacttcagcctggccttgcccaggtcgccgcctaggggaatctccttacccgttgcgtcgcgatagtagtacccgacccagactttgccgttcttgcgtgggcgcttgcgccttaccatcccaggcggcaagtccctgttctctgtattgcgggggcgcatatcaattcactcttgagaagtccggcgtccaagccgggcgcgccggcggcggacttggatcggcaatagttgcgatggccatgcccagcttcatccgggcaaacattcggccaaccaaggggcgtccgccgcggctctcgacgtacacccagttacggtctttaagccacttgcgttggtgcgcgcggtgcttgtacccggtcaagtcagcaagctcttcatccgaaagaatctccgcttccatgcctacctcccgctgcccgcagtgggccgcgctgtcttgatgatgtgaatggcaatgccgaagctgaccagcagccaggcgcaggtgccggcaaaggcgtagagaatgtcggctgtctcgccgtccatgagcagcaccgggccgagccagaagaaccagcagaccgtagctgacacgtacagcaagacgcccagcatcagcagggtgagtttgattgagtacatgtggtgtccttgccgcgcacggcggcagaagttggcccaccgctttccggcaggcacttatgctttaatgagaaaaattcttgcaggtggcgcgaaatggataaggcgtttagaaaccctttgtttttgactgggatcccgttggcaatctgcggcattgcgatcactgcgccagccctttggattcccggtttggttttgatggtttgtgggttggcgaagagtaagaaacagccttgatgctcaccggcaggcgtgtagggggattgggttttggctcagcaagggtagttctatttcactatgtactttgctaggttgagcagcttttataaatggaggttttagaatatggaaattggtgatctgaaaaaattaaatatctcattgtcaacgaatttggcaattttctttttttcgtttgttgctcccggttttttgattttttataagtatgagcctgaggcgtttgtatctatcgatgtatctaaacttattgttttggctatagctatctcgtcgcctacatttatttttcctctggtttttaccgccctgtttgccaatgtgatcgcaagagaaatgccagataaacgttatttgtgggggacacccacggactggtatcttaagcaaggggctgcgaatgcattaaatatgtatacgattattgcggtgatttgggtttttgatttggccggcacttgggtgttctggcttatgctctttaacgtatttctgaatctgatggttgaaactctttcctttttgagttttctaaagtgtccgtctaataagcattctgtttggtttgaaaacttatctacctacagccctgtagaaagaaaagcagaataatttttattttttcgcacgttaagctcctgcggccagatctttcaatgttgaatggtcgctcacgggcatactcatccttgccgctatagcggctgactttgaaggggggagggattcagttgttttttgacttagaatcgccctggtcctcgctcaacgatgcttgttaagcgggcgacgcggacagctataacaattggcagaaaggacagagccttatggaaagcaacgtcttggtattttttaggcgctatcggtacttgttactgtcgttgatggtggttgcttctctcgttaacgctggtgtgcgtttttctggggataggcgtaatttttttgagacgttagtgatacatggatggttcatccaggcagtatttgcttacttccgagggggctggatcggtattggaccaggctcattatccaaggacgcgcatcccatgggcagggcagcgttagccgcaattgcgttcgcattttaccttttgacgttcacctacggcgggcacaggcgcgatgaagcagtccatgaaagaagagcttctgactggactatgcctacacgagaagagttcaggcgtgcgccagagcaatagcacactggtgtgggcatagattgctcatcttgaagttttactggttaccaaatcattgggattcacaaccgtcatgccgaggctctcggcgatcaggacttccaggcgagcaccctttgaatgctcccagccgggcagggtggtgacggtgtcgcaatccatcagggcggcaatgtcgcgccgcatgcagtcgtcccaggtgccgccgtcggggttgatctcggcggattggtgacggtgtggccgccggcgcgcaggttggtggtcatggcgtggaacgcggcgaagttgaggccgggcaggccggtcatggggccgctgaggtaaatccgtttcacggggagtccttgccgggccatgcccgggcggtggagttggggatttaagcggcgtcagtcgctgtcgatcgagagcaaggggaatgctgttgctgccactcgcggaacttgtccattcccaagggctttaagtcggtccagcctgttggccatcccattaaccactcgacccagtccgggttcagctggccatgcagcgctgaaggcctgacctgcgcagatagcttcggctcgccacggctgttccactttccctggggccggctgacggcatcgtccgccaccggcgtctgccacagcttgaccgcactgctgagcccccagccggatgtcttgcttgatcctggctggttgtggttcccgtgaaccgttggcgttggccacaatccagatgcgatcgcgctgatggggcgctccgcagtcggatgctgaaacaaagcaccagctcgcgtcataccccatttcggtaaggtcactgaggaccagtgcaagtcctctatccacaagccttggtgagttttccacgtagacgagccgaggtcgtacctcgccgatgattcgtgccatttcacgccagaggccagagcgggcaccatcgatgccgtcgccattcccggcagctgatatgtcctgacacgggaatccgccagaaaccacgtcagcaatgccgcgccatggtcttccgtcaaaactgcacacgtcagaccaaatcgggaaagctgggagtgctccatcgttttgtcgttgcgccagaacttgtgcggagtaggcatcacgctcaacggcgcagacggtgcgccacccgagcaggtggccgccgagtattccgccaccagagcctgcgaaaagagccagctcattcatttatcctccgtgcagccgacaacctcgccggctggcgtgattcgtttaaagggggtattgatgtacttcggacattcggcccgttaggggaactgatatggcctgggtagttgtgcttacaagtcccggcggcgacagattttatggtgaagctatcgatcgcgatggcattcgatatcgttgtgccactccggctcaagcggaagcctttcagacaaagtcagacgcagaagcaagcttctattacttccgatttatgagggcgctggatggatatctgcttgaagctgtagagatctagatggctcatgtgttctttgtacgcatgcctcgccgacggacgtgctttagatttgtgggcaattggtgtttgtctagctcgtccaggcaggaggccgacatgagactgcaaagcgatatcgatgcgctcgcggcaatcgaagaagacgcgcgcgctatgctcaagcgggtaggtcttccaaatgataaacagaagcttgaggtcgtgatttgtctgcggcagatcattgatctggcgacctacagaaaacatatcgacgagtatccggagccatcggcacgatagtgcgcagctggcacagttcgttgatatggggtattacgggtgaccggcatggagccggatcaagcggtgaggcgctcgccaatcaccgtggtggtgaactgaatcgtgtactcggtgacaagttcgaactcgccgccgcaggtgtcgcaggtcatgttcttgtcgccgtaattttcagcctcaatgtggatgaccgttgcgcaatgcgggcatttgcattcgtcctggctgcgataatcccactcgtcatattcgctctcggctaccttggctagcgcttcggctttcgcaacggcgtcttctgcgtcctgacacggcttgcaggtaaagccgtcaggatggccccacggtgtttccgtgagcttcgagcggtgagtgctgcacaggcggcaaacgttgtgcttatcgcacaccgagtagctgtacttctcaccggttccgttgcacttggcgcaaccagaaacccagtaccatgcgccattgatccgctcggcgtacaggccgttttccgggggccgtaggctgacttcgggcaggtcagtagtggttcggtgaaatctgtgatgatccgccccgttccacacgttgaggccgccgttacgctggcgctgggtccactcacccgggatctccgggatcaggatcttcgtgttcttgtccatggattatctccagtcaggcgccgccctccgtgatctcggatggaggcggaatgattgatagcgttactgggtggggaaatttacaatttctgttttatcatggagatgaatagatgttccccaagtacgtgcgtccggttggctatggtttggtggtagtaggaacgatctcactactattttcggcattcgagttatttgcgggaagagactctctgttcgccgtggctaaatcagcagtgtttgttctggttggtgtttggattatcaagagcgcagtgaaggtctagctacatcccaaagtgccaattttacacagctgtcgccctccgttaccggatgcagcgagtagggtgggttacgcggccatgagcaagccgcagagtagcgacgtctgcagagctgctggttgagaaactaagttggattagccgaacagcgacaactctttgagtttccgctccgtggcccaatcgaattttgtctgaacggtgtcagcttgatcctcagtaatcatgcctgcgcaagtcaggccgattacaaagccatgagctttcgcgccgtacttcactgcgaggatcattgatccagcagtctcgatctctctgagaattttttcagcaggccccagcgctgcgaccggcaagtcgaaactgtcactggtcatcgtccactccgcacgcacaaggttctatggctctaggcctgacggggcgtctcgccctttataaatcacgaccctagcagtaacccggggttcaaaataacgaaatgatccgcttatgagctcaggctggcgaaaaatattcgtcgcctggatcgttgcgtaattctcgcagactttcgctatgaaaggctcgcgccacgtttgcgctaatcacgatttcgtggcgcggatactgttgtgcgcaacagtgggggcgttgaccttgtgcagcatgagcgtcttcgccgccgtggagcgcaagcgttttgatctgtcggtcagtattccaacggtcgactttcacgtgttgccggtcaacccgcaggtactgactcacgagcaagtactggagtgggatgtacgcaggaatgacctgcggccgctggtggccgatttcgatgtcaagaacagcgcgggcgcgatcagtgcttacctggattcggcaccgaccatgagcaatggcagtgccacgttcagcctcaatgtacgcttcaacggggtcgacttgttggtgcagcgaaataacatccgcacggtggtcactgagcaggcggcgcgtatcggcgcacgcgtgcccttggagattcaaccggtgcgcccggccaatgggtatgaggccgggacttactatggcaatgtgcggatgatcttcgatgccgttgcgccgcgctgaaggttttttgactatattgtcggctgggctgctgtcagcttggctccacggctctccaagcgagcgggcgcccatccttaagaggcttacatgaaagcactggtagtcgatgaccatccgttcattcgctcggcgatcaagttggcgcttgaaaaagaagggctggaggtggtggggctggccgcggacggtatcgaggcgatccatcaggccaagacgttgttgccagacctgatggtactggacattgcgttgcccatgctcgatgggctggaagtcatcaaccgcatcggtaccctgggcctgcccatccggatcctggtcctgacctcgttgaatgccgagttctattcgatgcgttgcatgaaggccggcgcggcgggttacctggcgaaaaccggggatgaagtggacctgggccgggcggtcaaagccatcatgtcgggttatacctttttccccaacctggcgatgagcaccgtgcgccgggatgattcggatgtcagtgaccaaggcctgatccagaagctctcggatcgcgaactgtcgatcctgcagcagctgtcccgaggcatgagcaacaaggaaatcagcgaagccatgttgatcagcagcaaaacggtcagtacctacaaggcccgtctgatcgagaagctcaaggtcaagtccttggtgtacctcgctgattttgcccgtcgcaatcacctgatttagcggcccatgaacctgcgcgctatcgcccacctggtgctgttgctcggcagcttgctgctggtgtcgactgcctatggagtggccgaaccgttcaaactgttcagccgctccagcgctgcgggcttgagccttgcgctggatgaggaggactggcgctggctgcgcgccaaaggggttttacgcctgggggtttcggccccggattcggcgccgctggacattacgtcagacgatggcacctacgaagggtataccgccgactatgccgggctgttgtccgagttgttgagcatccgggtcgaggtgctgcgtttcgattcccgggaagagtccatcgaggccctcaaacaaggcaagatcgacctgctggggtcctcgaccgggtttgagtccgccgatccggaactggccctgtcgcggccctatgccgatagccaggcgatgctggcggtgagtacacaaacgggtaacacgccgctcgacagcacgctggccggcaaacgcctggccatgtatgaccactttttaccggcgcagatgatcaagggcctttatcccgacgccacgttgaagttgtatacctcggagctcagtgcgctgggcgcagtggcgttcgggcaggccgacgtgttcctcggggacgggatcaccaccggctatgtgatcaacaagtactacccgggcaacgtgcagatcaacagctttgcgcatatctcctatgacgatgtggcgtttgtgctgttgccgggcaatcaatccctgttgcgcatcatcaacaagaccctggaagccatcccttcgtggaaatacctgaccatcctcaggcgctggagcgccggcgcggtcaatctgccctgggcccaaaccgtcgatttcagcccgcgggagcggcgctggctggaggcgcacagaaagctgaaaatcggtgtgttggatgactatccacctttgtctttttttgatcaggccggccattaccagggcgtgatcgcaacgggctgttgctgatgtgcaactccgactacctgcgcgcactggaccagcgttccgatgacgtcatcgggcagcccgtcgcccaaggcattctcggctggcaaggcgagccgggctacagcgcagcctatgcccgagtgctggagacgggagagcctttgcttgaggaccgcgtcatcagcctgcagggggcgaagcaggtgacggcccagcattggctgttgccgtttcgcgtgagtggcggagagattggcggagtcatcgccggttggatcgacattggcgaacgccatcgcctgatgagtcagctacaagaagccaaggacgaggctgaccgcgccaaccgcgcgaaaacctcattcctggcgaccatgagccacgaaatccgcacgcccatgaacgcggtaatcggcatgctggagttggcgctcaaacgcgctgacaagggcgtattggaccgcttttcgatagaggtggcctcacgctcggcccacgggctgctggacctgatcggtgacattctcgatgtggtgaaaatcgagtccggcaaactgaccctgtcgccgcagcgggccaacctgcgggcgctggtggagtcggtcgtgcaggtgtttgacggcgttgcccggcagaagggtttgcacctggtgcttgagttcgatgggcaggccagcggcgacgtgttggtggaccccctgcatttcaagcaaattctttccaacctgttgagcaatgccatcaagtttacgggccagggttatgtgcacttgagcctgaatgttttgccgacggcggatgacagccgcatggggctcaggctgctggtcaaggacaccggcgtggggatttccgaagacaatcagaaacggctgttcaaacccttcagccaggtccaggacggcgggcactcggcttaccgcgggtcgggcctggggctgctgatcagccgcacgttgtgcaccctgatgcaagggcacttgaacctcagcagtgagctgggtgaggggacgcaggtcgaggtgctgctcagcctgctcaagcttgcgccattgccgccgcaggtgtctgtgccgcaagccgagccccagggcggtccgctgcgggtgctggtagtggatgactatccggccaaccgcattctgatgtcccagcagctcggttacctggggcattcggtcgtcgaagccgaaaacggcgaaaaaggcctgcaggcctggcgcgatggccagtttgatgtggtcatcactgactgcaacatgccggtggtgagtggctacgaactggccaggttgattcgccagcttgaacagcaccagcaggcgctgccttgcttgatcctcgggtttaccgccaatgcccaggaagaagagaagcgcttgtgccttgaggccggcatggacgattgcctgttcaaaccggccagcctggcggacctgcatgcctgcctgcgtctggtggagtccagcttcgtggcgccgccgattcagttgagcagccatttcgacgcgattgacttgaccgggctcgaccagttgaccagtggtgacaaagtcgccatgcgcaggctgctgacagacctggccgcgagcaatgaagaggattcgttgcggctggtgaaactgttcggcgaacaggaccgtccagggttggcggagttggctcaccgaatcaagggcgcggcgaaaatcatcaagtcagaacgtatgattcaatgctgtgaacagctggaggtcgcgtgcaaggcggatgacgccgagctgttggtgcagtcggtggacgatcttcagcagaccatggagcaactgtcggtgattctcgaggattgcctggagcagctgttaacggaagagggcgcggcctgagtcaggctcaggcgttttcgtgtagggcatttccttcaatgaatcggaaaataccccgccttcctcaggccgcgcctgactgaagcccgcctctcgaattcgcatactggcgccctgcatctttgtgagcgccttatgaacgtcccggccaccaccattctggttcttgaagaacacgcctttcaacgctctatcgcggtgatgatgctcgagcgctccggcgagttcaacgtgttgagcgccgccacgatcaagcaggcgcataacctgttgcagggtggccagcgggtcgacattttactgtgcgaggtgcgcatggacagcctcgacagcctgctgtttttgcgccagtgcgggcagaaacacaacgtgcgttcactggtgctcagcagcgccttgaaccccgacgtgcaactggccgtggaagcgttggtgccgcagttgggcatggcattgctgggtaccctggaaaagcctttgcagcaggatcaattgagcaagctgttggcgctgtacccctgcaaatcggtggcccgggacctcggggtttcctttcgtgcgcaggccagtgaattggaagtacgcaaggcgttgctggaaggccatatccagccttatttccaacccaagttcaatttgcagacgaatgaggttgtcggtgccgaggtcttggcacgctggctccatcctcggcgcggcgtgctgcctcccgcggtgttcatgccggttctggagcggtgcgggttgttgaacgagttgttgttttctcagctccatcagggtttggcgttgcaaaagaccctgaagaagcaaggccgcagtgttgcatttgcctataacctcgaagtggagcaactggccaatccgacgctggtttccaggctggccgcggttttaaagagccatggcatgccggccagtggtttgatgttcgagttgaccgagcgcggggccttcacagccaacacggtctatcaagagagcctggtgggcttgagaatgcttggctgccaattatccatcgatgacttcggcactggcttttcctcgctgcaacgcttgtgccaggcgccgttcaatgagctcaagctggatgccgagtttgtccggggggcggcctgcgacaagcgctgccaggccatcatccagcacatgcttgccctcggctgctcgctggggatgtcagtggtgctcgaaggcattgaaaccgagatgcagcgccaggctttgattgagctgggggcaacccttgggcagggctacctgtatgccgggcccatgagcgccgccgactggctggcctggccgctcacggcgggctacggaaaagtcgacgggctatgacgaacaaacgcctgcggatcatgattgtcgagcgtgatcatctacaacgcttgagcatcgaaaaaagcctcaatgggctggggtattacgccataaccgggatgaactcggcggcggacgccgtttcggtactgcactatgcccagcagctgtttgactgggtgattgccaacagcgagttggtggccgaagcagacatcgacttcctggcgctgtgccgggaccacccttttgtgcgccataccctgatgtatgaatgccgcctgccggtattcgaatcgtccaggcggggctcgtcagtgaagatacagtcgacgttgtctcacctgcctgacagccgttccatgcgttggctgatgcagagccttgagggggttgaacctgctgagcctgcatgacgtcatccttgcctggctgggcgatgccagcccgggaaggggtaggtcgccctgcgcacgaggtgtacagtgctcgaggctcaagctgcctccaaccgaaaccgaaaaacagggacgtcatgaaacctctttgcttgctttcaatcgcattgctcgccggttgcaccccggcgcccagatacctcgtgcccgacggcgcaccccaggcacagatccgcagcgaactggacgccctggacaaccatcgcaacgccctgaacctgtccgaagcgccgaccctgggctgtaaatacggtagaaccgtggaagttgtgccgggtgggcagttggtctcggtccacaaaaacacctcgaatccgccaggttactttccgatcgaagccggcaagccgctgcatctggtcatgcgcggctgggcaaacgccaaccgcacctgcaggataggtttcgtcagtgagtttgcgccgggtgcgcggtacgtgatcaagggggggattgtcgatgacccgtcggccttgagtggttgccatatcactattttcaacgcggattcaggcgtacgcgtgcccgtcgctgacgaacctaaagtagagcgtggctgtgcgttggacaagctgccactgcaatgacgggcagggctcaacagttgagcaccggcgtataacgctcctcacgtttcttgaagtgaatcggcgccatggggactttctcgccattcacaaaaatagccggaaaggtcagggtaaagtcatccaggtcacctttgcccaagggtgtgcccttgctgtcggagttgttgatgtctctggggtcaaagccggttttcaaacgctcgacgctgacctgataggtctgcccggacgccagttgtacagtgacttcaggtgacgcggcgctgacccagagcggcgtctgcccgttgtccaaagctggtttataaaggcggccaaacaggcgaagttccgcatcggctgatttcacattacccggccagctcggcgtgccgggtggcgccacatacaccagcacgcgaacccagttgagcgcttgcgaagcgggcatgacactgatggctgcgtgcgcgccggggcaggtgcgtgagagcagggcgttctggccaatgctggattcggggtgcagataaggcccggtgctgcagcccgtgaccaatgccaatgctgcgatgaggaggtatgtcttcatctgccaattccctttgtcgtcgtgatagtgggtgcatttaagcatgtctatcgcgcgggcccgcaaaccgcttttcacccaatggcagacaaagaaaagcccacgatgggggcgcgggcttaaagggtgttcgcttaggagctgagttcaaactaggcgcctgactgtgaaaaccgtgtgaaattggcgtgcgcattatgttttttgcaatgcagctgtgtgctcgcgtagtgtgcttgcttcatgcctaacctgtgcaaaggtgttttcatgtcagatgaagtgcggcttgtcgtcattatcaccgcccagcccggcaaaggttcgcagcagttggctgcgtttgcgaaactggcgcctcaggtcagggccgaggagggatgcctgcaatacgatttgcatccggtcgtcggcaaccctgacagttttgtgctgatcgagaagtgggcgtccaaagactcactggatgcccaccacaaggcggcgcatatggtggaggcggccaggcataacccgtctttccgtgccgggcctgctaccgttttgctgctggacgccgcagtgctacctgcctgaatctgaatggctctacagttccacccgccgcaatctgccgctcaatggcaccactcggttgtctggcgtgggaacctgccgccccgtcaggcccatgccctcactcaccaccaccgcccccggtaccaggcacaggttggacggggtatccagcccgcgcgccagcatttcgacgtgcccactgcgcaggttgcaccgcaacaaccgcccgctgtaccgggtgaaaccgccatgcagcggttcgccatcccagcccggcggcaagggttgctgcaagtggctgcacagttccagcaccagcaggttgccgttcgggcacagcgccagcccggtgggcagttgcaggccgcgtatcaccacctccatctgcccgttggcggggtgaacccggatcacctggccggcgaagtccgcaaagtcgatgcccttgcgcgccgggtcgccctgcaattcaccggagaacaggctgatcagcactgcgtcggtctcgggctcgtacaccaacgtgacggggacggcttcctggtcctggtccagttcggggagttgcgccagcacgcgttcttcctcgccatcgcgaaattccaccagctggttggtgtcgggcttgacggccaaccaactgcgccgcgtcgggtggtagcacagcgcattcagattgccgcggctatgaaacaccggctccggcgggctgtattgcaggtcgagcagtttggagccgccgacataatcggtctggctggccaggcagcgcccgtcaccacaggcgatatcggacaaccccatgatttcatcgcgcagcatgcgcgcctgcatgttcatcgcgcgaaacccttgggcgacggtttcaccgggcaggtaggcgccgggtcgttgcgggtcaggcgccagccggctgatgcggccactgaacggctggtcgggcaagcctgagccggcttcagccagtaacaggctgccgtcggcttgcaggcaaaggccgcgcgggttgagcaggccttcggcaatccattgactggggcgcagggtctcggtgggctgcgctggaatatgaatgctcatcgggtttccctcctattgcggtggctgccacgggctgcccgtgaggtaggcgcgcagcaaggcacgctgcgcaggcgacatcgaacgcaccaccggcatgaacagcgttgtgcctttgtaggcgtctgcggtgcgcgcgaggatggcgttttttgccgccatgattgcgtccggctggttcaacggcacgtagcgcgacatggccgggaaggccaggtaatgaaagcgcagcacgttggggtacacctgttgccaggtgatgatgctgcccttggcgataccaaagtcggtttgcgcgtatttgcgcaagttggtgaaaaacgcaccgttgtccacgccattcgccgtgtacgtcagcgacacaaacccggcctgggccgcgctgccgggttttacagtgacaggaaaactcagcgcctgctggccggcattcagcgtcatcgacgccggaaaattcaggaagtccgtgtactgcttgccctcataggtccccggcgcactggcttgcacgctgattttggtggcgctgggcaccggcccacccaggtagctgacccgcaagttgatcgtcagcccgtttgggtagtcttccaggtatacgttgcgctggtcggcatacacccggtaggtcgactcgatggcgttaagcgtcttgccgttcaccgccgtcgggccggtgatggtcagcgcggtggtcctcaccgcctgctgctggctggtgttcaacggcaggtcgacaatcccgccgtacacgtagtaattgaccaaggggctcgcggtcgggttgagggtggtcagcgcagtgcccccggcggcaatcgtcaccggcccgtagttcgcattcgggccgatggggctggtgatgtcatcccgcacggcgcggaaggtttgtttggggatgacattcaccatgcccaggctcaacaagccgttattgcccagcgctgcataagcggcgttgccggtgctgaggttgacgatttgccggcccggctggcagctcagcggctcaccggcgaaggccggggccagcgtgccgatcacccggccgatgctcgggttgggggtgaattttttcgcggcgtaatcggcgtccagttgcggcgtggtcatttgcgggcacatctcgaacatcacgaaacgcaacacaatgcccgtggcgccgggcgcctggatgatcgacttcaaaccggcgctgctcttgttccagctgacgatgctgctcagcgggaaggtcagttgaaaggtgccgctggcatggaacgagcctggcgcatccatctttgccgggtcgagcacgcggccggtcacgtcgaaactgctgcacaccgcattgtcgcgaatcagcaactgaatgttgttgctggcgccaatttgcaggccgccgacaaagatctgtgtggtcactgaagacgtggggtccaggtcgaccatcatcgggcccgacacggggccctggccggtcaccgggtccaccgagccgagcaggtacaccggctggccgatcagatcgccggtggtgctgatgctgcccgggttgccttgcgaactgatcaacgcgttctgcatgtccaccacgtgctggccgtaatggttccagccacctgcggtgtagtagttgccggcgggcgcgttgatcatgttgttcaactggtcgtcggtgtagggctgcgcgcccggcgccagagtcgaagtggtcaggtcgaacagcggccagtccgggttgccattgaacggaatggtcggcgagttgttcggcaagctcacgtccgtgcggatgccgccccagaaattcagtcgtggtccgttgagaatgctcatggtctattccttgtccgtggcgtgaggggtcagaggcgggttggcgaatttgaacaggtacgagaagtccgacttgaacgggctcttcaccggcgtcgccatggagtggcagttcatgcaactgctgttgggctggatgtaactttccatggtcacgttggccgacaacgcgggtgtgggctggcccagcgggttgctcggattgttcggcatcaacgggcgttgggtggtgacgagctggtagtacttcaacacgctgcgttgcaggccggggttggcgcggtagttgttgttgacccactgagtgacatcggcaatcggcgtcacccggttcagcgggttcggcgtctggaacgtggtgccggccttgggcacgcacaccagctgcgtgccctgggtttgccagttgcacggtgattggttcagcgcggcggcgggggcggcagcgttgaagtaggaatacgccgtgcccggcaccggttggtcgacccattggccgttgactttggccttgggcggcacgttttcaatttgttcgaaggtcgaccagatccactgcgggtagccattgaccttggtgatgatatgcagccccaccaagcccaaataggcctcgctgaccccgatcttctggccctggctgttgaaccgcgccacgcgcgcaaactgggtgaggtaatggctggcattgtcacgcggagtcaggatgcgccagctggatttgatctcgatcacgccgttggggaagttgatgttgttggccctggacaccacattcgcgttgtagaacgtgttgcccacgatgtagttgtaggacgcctggttagccgaaatatcgtagtaggtcgggttgcccgcctggtcgatcagccagccgccgacggcctggtcgatggagttgaccagcgtgctgtttttcagcgcggcaatgttgatgatgcccaggctcttggccttcaacgggctgttccacgggcccgggttggccgcgcccggcaggaaaatctcgctgacggtcttgtaggtttgccacacggtatagccggggtcgccgggttgtttgctgcaattgggcgcaccacgttggccgtcctgggcgggccagttcaaggcgataaacatgttccagctgtattggtcgaactggtcctggctggcgttggcggcgggtgcgctgctcggcggctggcagttcaattgggtggccagggtggccggttgcggctcttcacgcgcctgcgccgacaggccgaccagcccgagggccatcaggcaaaaactcactagctttttcatcgcggtccttcctctcacgtcagggtttgcgcggcatcaactggttccactgcgccttgcgcccgttgctctgggacgcgggcggctcgaacagttggcattgcggcgggttggtcgggcacatggcggcgacttgtgcccaggtctgggccgggtcgggtttggcgatgcgaaagttggtgtagttctggctgacaatcggcgcgttggccacgctggtgtcgccggaaaagaagaaggattgcggcagccggtaaggcggtttgcccgtctgctgtttgttgaacgcatagccgaacagaatcggccccgacggcgattgcaggtccagcgcataggcctgcacgctgccgcccaggttcttgctgcgctcaacgctgtagggcaggtgctgcacgaaatcctggcgcggcgggtggttcatcggcgagaacatgcagcaggccggcatgtctttcgggcggtcctcggggtaggtcaggaagtaggccttgttgcccagtgacacgaaggagcagctgtagttgttgttcttgatcgggaagatcggcaggcagtatttctcgtagtgctccagcattgcgccgaaaccgtcgccatcggcggggatgtaggtggtgtcgtagtagctggtgccgcgtgaaaccgtgtagtcagagggtttcagggtggatggcgggttgctgtagggcggcgggtttttctcgtagttgttcatcacccggtacatggtccaatcgctgatccattgcgcgggaaagaacgggtcggatggctcgccgggcaggcgtgtggcgatgcaattgccattctgcgcgttgcacccttcggtgttgtgcaccccgttggtgaagtacacggcgccgctgtcatccgcagcaaacgctgtggggcagaggaacagaatcagcaacaacagacggctcaagaggctggcgttcataagacactcctttgaaagccgggtgacaggtgtgtcacccggtggtcctgtgtgcggcgttaggtgtagtcactcatgctgagctggatgggcgggtaattgcgcttcaccagcgcttgcgcccacagctccagcacggcacggcggctttgcggcatgtcgcgggtgatgggcatcgccagcgtgctttcttcctgataggccttgctgatcagcacgatcaactggtcgacggcgccttcgatgcgcgtgaggttattgagcggcatgtacttgctcatgatcgggtacaggtaatagaacggctgcaggatgaaggggtagatgaaggtctcccagatcacctggccggcgtcttcgcgctggtagatcaggttccaggcattgacgaaatcctgttgcatctgcggttcctgcggcagcacccgcagcggcgcgaggaagtcggtgtaggcctggcccagcgggaagctgaacggaatcaccggcgcctgctgaccttcctgcacaaagaaacgcaaggtcggaaagcccggtgccagggccgtgaccgtcaggttggcgatcccgttggcgtcggtctggatctgcgtcaggctgtactgcaccgtactgttgagcggatcttgcagcgtgccttgccgggcaatcgggttttgaaacgcaagggttgggcttaacgggacagacgcgggtgtcggcaagaacgcttgataagtcacgggcgtggtctggtcggctgacgccgccagccgtgtcgccatcaactgacgcccggtgccgtcggtgacatggctgggcagggtgaccaccccctggaattgcggcaggttggcgctgttgttggccgggttcgccgggtcgttgttgaacagcgtgaagttcgccgcgttactgaaggccaggtagtaatcggtggtgcacagcatgtaggggttgccgtattccgcaacccacaacgttgtgccggcgggggcgggcaggccgtcgtattgcaccatgatttgcagcgttttggtgtcgcccacgtcgatgaaaccggcgctttgcaccacctcggcggtccacatctgttgggtcgcggccacgacgggtgtggtgccttgccattgcaattcgaggctgccggtttgcaactgcgtctgcgcctgcacggtgagcggcaggtcgagaatgcccgaacgcttgtcgaattgcagttgctggtaatcggcataaccgaatgtggccaacgggctgaattgcgtgccctggcggatgccgatctggtaattgccggcctggtatttggcggcaatcggaatgtcggcggccttgtcgaccgggtagaacgggaaggcattacccaggtccagcgacaaggtgtcgccatgggcctctaccgaaatcactccgagttgtaccgggttggtatcaccgggcgaggttttatagatgggcaccttttgcgccggcaccaggcgccggcccgccggggcggtggggaactcatccgcaaaccacaggcccacggtgccgaccgtgcggctgtaggccgggttgaagaagatatcgccgacgttatccagcgcctgctggtacatcgcctgcaccttggcctgggcctcggggctggaactgtgggtgtcgatgggcgggtagttgttgaggatgccgttcttgtcgtagcaggtcaggtaggtggtgaagcggaacatcaggcccttggcgttttgctgggtcatctgtgcctgcaagttttgcagcagggccgaactgccgagcacccactcgaggttctctttcgggaaacaggtttgccaggtggtggtgacgtagctcaggccgccgaggttggcccagttgaaattcaggaaacggtcgagcatgcggtgctcgcggttgagcgtcaggctgcaaccgctgccgcccagcaccagcttgtcgaagtacagcgcggtgaaggtgttctgccacgggctcacgtcgacaaagcgcgccggggagttgggtgcgccgccaaacgggttgccgagcaactggaagctctggttgatcagcgggtcgctgcccacatagccaccgtccggcagctcgccgccggtgatcaccgattgggtgccgttgtagctgacggtgccgcaggcattgtcaccgaacaggttccattcgccaggaatcatcggcgtggtcaactggccggcattgcccggcacctgcatcacatagctcggcacctgggccggcgccagcggtgcaatggtccacggcaacagggtggtggcggcgttcagcggggtaatgttgaacgactccagaaagcgccagttcatgcgcatcttcacggcgtcgtagagcgggtacatgtcgttgttgttggcggtcggcgggttccagaacatatggccaccgacgtagatacgcgggaaattcaatacgctcatgtcaggctccttagcgttgccactgggcgcgtttgagcgaccagacaaagtccagtttgtgatagccgacaaagtcggaagccggcagaggcgcggtggggtaaacaatcccgccgtttttgttgagggcgaaattgaagtagccctgttttggcgaatacgcagcggtgccgtggcaggcaaaacacgaggattcgctctggaacgccgactccagctgggagttggccagcagcgtcgggttggtgttggactgcacgccgatcagctcgtactgggccagcgccggaaactgcgcctggaacgtggtgttgaccggttgcgccgcagccgtcggcccggtgctgttggtcatcggcgtgggcgggatcgcgttggtcacggtgtatttgctgttgttgcgattttcgaaggtggtccacacccagtccgggttgagcttattgatcacatgcaggccgctcagcgcggcatagccgactacgtactctgtgccttgttggtagtaggtctgggcgatgtagtagccgtcattggccagttgctgctgataggtcgggttgttgccgatccacagccaggccgccttgagctcccacgcggtgaaggggaaattcaggtcactggtcagtgcggcctgaccgttcacgttgtacaccttctgctgcacgatgtagttgaaggtgtcttcgcccatcagcagctggaaacgtactgcctggccctgttcggcctgcggcacctggccgcccatttccaggatcagcccgtccacctgttgcgtggcgttgaggttgtgaaacatacgggtggtgttcatgcccatggcctgggcctgggtgatcactgcggccggcaccggtgtgcgctgggcgtagggcaggggcgcggcgcccttggccaggtacacctggtccgacggcttcagggtttcccagaccaggtccgggctctgcgccgccgccggttggttcaggcaggcgaaccagttccaggccagggtctcggggctctgggtaaaggtggttcgcgtcttgtcgatgtcgcctccaaattgcaggaagttgctgcaatcgaagggggtggtggtctgggcctgggccaatccggccagtgcactcagtaccgttatagataaggctcgccgcatggaagctccttggctgtggccagttcggtgtgggggcgccccaggaaatgctccaggagcagttgtttcaccgccgtggccgcaagatgctgcggtaacggcagatcacaattggtgatcagcagcgggccggtctgcgtgctggagggcaggcggccgtggctgccacggaccagcccggtgtccagcgggatcaggtccatgtagtagcgaaagccgagttgcttttgcagcaggcgccgcgcgactttcagcttggggaaacgaatggccgggtcgatgaacagctcgaccgggtcgtagccgggcttgcggtgaatgtccacggtgcgcgcaaagtccggcgccttgcggtcatcgaaccagtagtagtaatcgaaccagaaccccttggcggccacggccaccagctcgccgctgcgcgcatgatcgaggtgccaggcctgctgaccggccttgtccagcacctgctcaatgcccggctggcgctgcaacaaggctttgacacgcgggatgtcctcggcgcgcttcacgtagacatgcgcgatttgatggtcggccaccgcaaatgccgcgctggcgccggggtcgagcaattcccaactcagggattcgcgcacttgcaacaggccttcggtgcgcaacaggcggttgatcgacaccgattgctcgacagcttcgatgccgtattcggagagcagcatcacggccgcgccctcggcttcggcgaaggcgagcaagcgcccgacctcggcgtcaatggcgcgcacttcatccgtaatcgacgggtgatcaggccccacccgttgcaggctgtagtcgaggtgcggcaggtagatcagttgcaaatgcggccggctgatcttgaactcggccatggcgcactccacgatccagcggctcgacgcaatgcccgccgccggcccccagaaacccggaaacggaaacgcaccaatctgctgttcgatctgttcatgcaacccgggcggtgacgaatacaggccaaactgcttgcgcccatcggccgggtaatgcgggcgcggcgtgatggaggcgtcgacgtcggcgtacatgttgtaccaccagaacaactggctgcagcgaaagcccggcatctcacgcttgagggtatgccagaccttttcaccccggatcagcgcattcggttgcagccagaaccgtacctcggcctggtcgcgaaagtaccagccattgccgacgatgccgtgctgcgacggcggcgcgccggtgaggatcgacgcttgcaccgtcgaggtcaccgccgggaacaccggctgcagcgtcgccatcttggcggtcttgagcaacacgttgatatgcggcgtggcctcacccagcagcgacggcgtgagccccaccacgttgattagcagcagcggttgctcagaaggcatcggcgcaggcctccgccatccgggttcgcagcaggttgcgctggcgcaactggtcttcgacccagcgcagttcggcggcgatgccctccagctgtgcacgctcgttggccgggcgcagttgcgcggggagcacaccccagctgtaggtctccacttccagcactgggcgaaaatccgcatgggcggcgaggtagtcgaaggtctgcgccagggccacctggctgccgctcagctcgggcaacagcaggtgttcgctgaacagcggaatgtggaagtgaatgcgcagctcggtgaaacccgcgcagtgttccagggcggcgggcaggtcgggccaggccacgcgacggccatgggtgtcgagggatttgacctgatgcaggtaggtggtttcggcaaagctgccgagggtgttgagcacgtgttcgcgacgtttttcatcattggctggcaagcggcaaatcatcgcattggacagctggatcttgcccaccggcacccgcgcgtggcgcagccggtcgagggactggtagcagtcttcaaacatcactgcctggtggcacacgtcaaaacacagtgccaggtaggcatggttgggatcgatggcctggcggtgatgaaagaaggcgatggtttgctcagtgttttcaagcacgcagtccggttccatttccaggcaaaacacaatcttcttgccggtattgcggtgcaggtccgccagcgccgcggtgagctggctgaggtgttcgtcagcacgggtttgcaatgccggggtccaggtggcggcatagcccagcggcacgctggaaatcaccccttggcggcagtcaggcggcaaggcgtgggcgagaatgcgcgccaggtcgaggctgtaggccagccgctgcgggtcggcccagtctggcaaatacacctcggctttcaccgcgccctgatggaactcgccatagggaaaaccattcaacgacgtcaggcgcaagccgctgctgtacagcagcttcagaaagtgtgcgcgcgccgactcgtgctgcagttcggcggctgcatgggcgcaaatccacaggccgctgtcctgttcgctcaacccgcgcaggtgacgcacaccttgaaagtgctgctcgatggaggcgcgcaacccggcgaggtcgcgcgtggggtgcacgttgctgcaatagccgacctggctcgcggtccagccgctgacggcactcatttgaccaccgggtcctggccgcgcagggccgagttttcctgccattgcttgcgctggtcgatgggcaatggggtgctgaccagcgccttgtcgagctggccactttgggcaaagaaatccaccgggttgtggaacagcacctgctcgacctgagcctcagagaaacccgccgcgagcatcgcctggcccgttttcggtactttgagcgggtcgctgatgccccagtcggcggcgctgttgaccaccattttctcggtgccgtattcctgcaacagcgccaccatgcgctgctcggacattttggtgttggggtagatcgaatggccgcgccagcagtcgctgtcgagcaccagcggcagcgtcagttcgttgaggtggtcgatgatcaccaggtgctcggcgatccccacttcacggatcacggcgagggtgcgtttggtgccgccgatcttgtcgcggtgcggcgtgtgcaccagcaccggcaagttgaattgcctggcgagttccagctgcgcggcgagaaaacggtcttcttcgggggtgatgtcgtcgtagccgatttcgcccacggcgaccacgccgtctttgaccagataacgcggcagaatctccagtacttcgttggcgatcgacaggtcattggcctccttggggttcaggccgatggtgcagaaatggtggatgccgaacatgctcgcgcgaaagcgttcccagcccagcagggtgtcgaagtagtcgacaaaactgcccacgctggtgcgtgcctggccctgccagaacgccggttcaatgaccccggtgatcccggcggcggccatgttctggtagtcgtcggtagtgcggctgaccatgtgaatatgcggatcgaagtacttgagcatggtgaatcctcgtcaaggaaaaaggcgcaggcggtgagcggttcagttcaggtgggcgtgccattccggcggcaggcgcaagccgcccaggcgctggcgttgcgcggggctgagcaaggggaaagcgatggcgttgggcaggccgggggacacggttcgcgcggcggcgagttgttcgtccaacagatccagcgccagctgattgagcgtgacgccgtggcgttgctgcaggccgatgacacgacggatgtccaggcccatgcccaaggctttcagcaccagctggtgaaaggcgcgttcggggtagtggcgcgaggggtaagccgtgtcgagggcaagggcggcgaacacttgcgggttgctggtacgcccggcctgcaaggccagcgccaggcacaggccgtcgctgtcgagccagtcgagggctttgagcagcgcgattttctcgtggtcgtcgccccacagaaacagctggcgcagcgtcgcacattgctcggcatcagcggtttgctcaagtgcctgggccagcaacaaggcccttgccagttcgacctcgggcgccttgaggtgacgcttgcactggccgctcaacagcgccgtggtcgtggcgcccggttgttgagtcaggtgcgcctgtgcctgctgccaccactgcaactcggtagcgtccagctgttgggcaagggcttggcgatagtcgatgaggcattgctggcgcatgttcatgttggcttgatccagcgctgaaagtggggaagcaggaaaaacaccagcacgcacagcaggctgcccagcggctggctggccaccgccagcaccagcgcatcgaacagcggcagggcggcaaggcctgcgccgataaacgcgcgtacgctgcggtgctgcgggtcagccaggtgcttgcggtagtgccagcccagccagccgagccacaacagcagcaccggccagaaccacaggctggcggcgtagatcgccagcgcgagcgggctgagcatcaacagcaacggcaagcggctgatcaactggttgcggtgttcctggcgcgccaggtaggtcaggccactgatgtacacaccgagcagaatcgcgcacagccagatcggctccggcggcaccgccaggctcgccgcagcggtgaggtacagcgccgagcggcaggcgcccatcagccacacgctgtgagcatattttttgtgcagcacgttgtagccaacgatgcagcccaccagcagcaccacgccgcccagcaaccaatgcggctggtcaatcaggcggctcaagccaagtaccgcagcgccggcgagcatcagcaacagcgccgtggcaaggccgacctgttgacggctcgcaaggcccagggtgatggggcgcgggttgtggtgctgaaggtcccagtcggcgtcgagccagtcgttcaacagcatgccggccaggtacagcagcgacaggctgaccaacagcaacccccacaccagcgacgacggcggcgccagggccccggcgctactggcgagcagtgcggcggcgagggtgttggtccacaccgtaggcaggttggacacgcggcccagggtcagccaggttttcaccgtgctctggctcattgtgcgtaacccaggcgcagggccatgtcgctgcgggtgaccaattggtgcagcgcccattccatttgggcgtcatcgatttcatgcaggtccagcgactggccgatccggttgagcatcgggatcgacagctgcccacccaagtgctggcggaagtcctccaggccgagcaacacctgcgagcgcccttgggcgtctttcaggcccagttccggcgggcacaggttgaaacccagcgtgtgcaacaggttcatcacgcgctgggtgtcggcatcactcaacaaccccaaggcattcgcgtacagcccgtccagcgccatgcccaccgcgaccgcctcaccgtgacgcagccggtggtggctgaggttttccagcttgtgcgcggcccaatggccgtaatccagcgggcggccattgccgcgttcgaacgggtcgccggcgccggtgatatgccccaggtgcagctcggcgcagcggcggatggcatagcggctggccgggtgatcgaagcgggcgagggcaccggcgtgttgctccatccactcgaaaaaggcctggtccttgatcagcgccaccttgaccgcttcggcaagcccggcgatctggtcgcggtgggtgaggctggtgagcagttggaagtcattgatcactgccgtggcggggtagaaggcgcccagcaggtttttctggccgaaggcattgatgccgtttttcacgccgatgccggcgtcgttctgcgccagcacggtagtcgggatgcggatcagccggatgccccggtggaaggttgcacaggcgtagcccaccgaatccaggaccgcgccgccgcccagggccagcacgtagcaatgtcggtcgaggccgtggtgcagcatgtcggtgtagagctgttccagcacgtgcgcggttttgctcagttcaccggcggggacggcaatgggtgcggtgagcaaatgcaggtcggtggcgtggtgggtgaagtaggcgtcgatttgcgtgagcagctccggtgcgctgttgagcagttgctcatcggcgaacaccatcaccgtgactggcctctggtgctgagcggtgagttgctggtgcaagcaggggttgagcgggtcgaacaggtgatcggtgaacaccaccgggtagtcgtaactcacctcgaaacggccgtgcagcggttgcccggcatcgggtttgcgcatggccttgaacaggctgcaaccggccacgaacagcagcggcagcaccatgctcgcaaggatcgtcaccagcagcgcgttctcctcgatcaggaaggtgccaatggccgtgtaagccagtgccaggcccgcgttggccaaggtggtgatgagtaaaaacgcgcgcagcggatagcgttgcatgccagcggccaccaccgaggtttccgccagcaccggcacgccgcgcaggcagatcagcgacagcgtgttcagccggtacgccagttgccccggttggcgttggtgcagccccaggcgacccgacagcaagcgaaaataaccggcccccaacgcatagcccaacccggcgcccaggcacaggccgataaagatcgccaggtaaccgccgaggctgccgagcagggccactgccagcaacgcgaccatgctcgacggcaccggcaacaccacgtctagcgcgagcagggcgatcagcaacagtgcgacagacaaggcgccgttggcggtggtgggctggaactgattgagttgaatcagaacgtgctgaatctgttgttcgaataacaggaaactggcgataaccagtacagagaaaaccatcaatgacagccagaaatgatcgaccggcccctttttcgaaaacgcacgacgccactggctgcgcttcatcaaagcatcccttttcaagtgtaaagaccaagttccgtttcagtcgtcaacgctatttcagagcaacagagtcccctgcctggagggctggtaaaacgggcgattgagtacggcggtgaaggtattcatgaacgtagacggttgtgatttttttgcaagttcaggcggtaaaggagttgcaggagggggcgcaggcagggcggggaggcgggcacttggccaatatttacaattacttgtatggctttttatgcagcgtcaataacccgttttaaaacctccaactcactcaccaggcagcgatgttagttgggtgggttattgccgctggctataagtaatttggtcatacttagttgtcgagaacaattccgtttaagccgtggaatgtttaaggtgccgagtctggaacagcgcgataaacagcgacttcatccgaacgaatcgtctctttcaaggtgtaagttgaaccggttttgatcttgaccttccagtgctgcgttgcccgtgatgcgttggcgttgaaggcggcgtccgggactgccgcgacgttgtcgtagcgatacagggtgtaggcaacgtccggcttcaaaccggagattgtcagggtcagtttcaacaggcccggcggcgggcgtttgttggcgtgttgcgccatcgccggttcctcggcattgacatccgtccagaggcgcaccggcaatgtttcaccgtcgtggtcgacgatgccggtgatcgccacgccaaactgcttgccgcgcggcagggaatacacggcccgcgacggcgcattcgcttcttggcggctggcctggaattcgccgaacgggaacgggtagcggtagacgggcgcaccgtcgggggcccacaggccgttgtcactcagtgtcagcacatcgtcggcgtaatagcccggcgatgaggtgaacgggtgcttcgacgagacgcccagcaccggcacgatatggtcgtactgcgcgtcaccggcctcggcgtcatcggagccttcgaagtggtgcatgttttcatacacaccgatgatcaccgggtaaccggccagcacattgcccttgacccacgtcaggaaattattggcgtttggtgtgctgacactgctccactgctgcgcctgcaagtgcatgcgtgcagcggcggcggcatcgttgacccccggcaacaactggctgcccgctttggactggtcgacacccgggctggcgagggcgcgggcgtcatattgggaaacgtactggccgtaatagagcccggcgctgatgaacgccacttcgccgcagtaaccgtagttcgccgtccattgcaggcgcggcgggatatcgttcttcaggcgcgcggcggccgagtcctgtgcccacagcactacgggtaacagcaggaccatgaacagcctgtgtggtttgagcctcgacatctcgatcgcctttgacagtgaggcccaaaagcttaccgaccctgggtggagtttcccgcgaggctgtgtggagaaacgatggagacgctaccggcgcaggctgttgcggtacgccttgggcgaacggccggtgatgcgtttgaaagcgttgctgaatgcgctgtccgagccatagcccagggattgcgccagcaccgcgatgggggtgttttcctcgcgcaaggctcgctcggcaagatgcatgcgccattgcgtcaggtaggtcagtggcgctacgccggcaacggccttgaaatgaaacgcgaacgtggtgcgcgacatcgcacaggcgcccgccagttcttcaagcggccaggcgcgttcgggctgttcgtgcatcaggcgcatggccggtgccaggcgcgggtcgctcaatgcgcgcagccaaccggcgggcaagtcgctggcggtgctcaaatgtgcacgcatgatctgaatgaacaacaactgcgacagctgcgcgcaggcgagttgcacgccgggcagcgcggcctgttgttctgccaccaactgatcgagcaacccgcgaaatgccatggcctgcggcgaagcggccgacacgtgaatccacggcggcaacacctggaccagcaggcgcccgctgatggggtcaagcagcacatgcccgccgatataggtgaaggcctcgccgtcacccaactgtgcggtgttcttgccggacccggaaaacagctgcatggcatccaccggttccaccgacggttcactggacaacacaaagccgcgcgccgccgtcagcaggccgacgtcgccggtgtcaaaccttaccggttcgggctcgccgtcgatgctgacaaagcaatgccccttgatcaccgcaaagaacttgatggaagtgggcgggggaaagcggatcgcccaggggccaccggcgctgaaaccgccggtcatcagcgattcggcgtgggtcagcctgaggatgtcggaaaagggatcactgctcacattcgtactctcgcgatagttatctgcacgctggcgcattcaacgtccggcagggcgactctatcatgggcgctttccgattcgctgaatcctgaccctggaggtcaccatgctcgagacacctacgtgggtgctggttaccggcggcaccggttttatcgcgcaacactgcatcattgccttgctcaaccagggctattgcgtgcgcaccaccgtgcgctcgttaaaccgtgaagccgaagtgcgcgcccacctcaaaaccggcggcgtggagccgggtgaccggctggccgtggtgcgcgccgatttgagtgaagaccgtggctgggccgaggccgttgccggttgcgcctatgtgttgcacggcgcctcgcccacgccttctggcgatcagacccgtgaagaacaatgggtcaaaccagcggtggacggcaacctgcgggtgctgcgcgccgcgcgcgaggcgggggtcaaacgggtggtgctgacgtcggcgttcggcgccgtgggcgtgggccatccgccgatgcaccggccctttgacgagaccgactggagcaacctggatgcgggcctggcgccctatcaaaagtccaaaaccctgtcggagcgcgccgcctgggacttcatcgccagggaagggcgcgggctggagctggcggccgtcaacccggtggccgtgctcggcccggcgttgggcgaggactattcgcactccatccgcattatccagcgcctgatggaaggccagggcggctgcccaaaaatcaactcgagctttgtggatgtgcgcgacgtcgccgacctgcacctgctggccatgacccacccggccgccaggggcgagcgctttctggcttcggcgggggaaagcctgtggatcaaggacgtggcccaggtgctgaaacgccgcctggggcctgccgccgacaaggtctcgacgcgggtgttgcccaactggctgatacgcctgctcgcccgacgtaaccctaacctggccaacatggtgccgttgctgggcgtgaaactgaatgccagcagcgccaaggccatccgcctgctgggctgggcgccgcgttcgcaggaggcgtcgattgtcgccaccgccgagagcctggtgcgcctgggtttggtggggcacaaagcctgacgctggcttaaccggcggtgtagcggaagccgcccgatagcttctccttcagaaaccctaccaaggcactcaccgacttcggcacatggggcgagtacgggcgaatcaggtagatttcatcggcaaacgcgcctttgagcgtccagtccttgagcacctgcaccagcttgccgctggccagcgcggcgtgggcgctgaagtccggcagcagggcgatgcccaagtggttgagcgctgaatcgcgcagggcctcgctgttgttggtggcgaagctgccggcgatgggcacggtgaggcgttcgggttttttgctgccgcgctcgaaggtccaggcgggctggtcggtgccgcgcgggtagaacaggcaattgtgggtgccgaggtcggccggttcgcgcggctcgccgtggcgttgcaggtattcgcgggtggccaccagcaccgacgaggtgtcgcacagcttccacgccacgtgggtttccggcacctgaaaaccatggcgtaccgccaggtcgtaaccctcggcggccagtgagctcaaggcatccgacacatccagttgaatgcgcacttgcgggtactgctgcagaaattccgacaggtgcggcaccagttgctggcgggcgaatgccactggcgcggtgagacgcaccagcccgcgaatctcgccggccgagtcgcgcaccgaggagaaactgcgcgcgatatgcgcgtaggcgctgcgcacttcacgggtcagggattgccccgcgtccgtcagccgcacgctgcgcgtggtgcgggtgaccagccgcgtgccggtggccttttccaggtccgagatgcgttggctgaccgccgacttgctcacgcccagccgcgccgccgcggccgtgtaagtgccgtgttcttcaagcaccgacaaccagtgaatatgggtccagagcccctcgatctcagctttttccatggttctattgttcgcttgtgaggacaatcagttctggattctgctctggtttggaacaaaccgaaagcctatcgtgtgcctcaacgctaccgacccgggatcaaccgccatgaccaccacgattgagcactacatcaacgaccagcgcgtgagccgcgatgaccgctaccaggacgtctacaacccggccaccggcgaagtcaccgggcgcgtcgcactggccagccgccagaccgtggccgaagcggtcgctgccgcccaggccgcgttcgccggctgggccgacaccccgccaatccgccgcgcccgtgtgctgttcgaatacctgcacctgctgcgcgaacgcaaagacgacctggcgcgcatcatcgtcgccgagcacggcaaagtcttcaccgacgcccagggcgaagtggaccggggcatcgacattctcgaattcgcctgcggcattcccaaccttctcaagggtgaacattccgaccaggtgtcccgtggcatggacaactggaccatgcgccaacctctgggcgttgtggccggtgtcacgccgttcaacttcccggtgatggtgccgatgtggatgtacccgatcgccatcgcggcgggcaacaccttcatcctcaagccaagcccgaccgacccgagtgcatcgctgttcatggccgagttgctgcgtgaagccggcttgcccaaaggcgtgttcaacgtggtgcagggcgacaaggaatcggtggacgcgctgatcgaacacccggacgtcaaggcgctgagctccgtgggttcgacgccgattgcccaatacatctacgaaaccggcgcgcgcaacggcaaacgcgtgcaaggcctgggcggcgcgaaaaaccacatggtggtgatgcccgacgccgacatcgaaaaaaccgtcgacgcattgatgggcgccgcctacggcagtgctggcgagcgctgcatggccatctccgtggcggtgctggtgggcgatgtgggtgacaaagtcatcgccgccctgactgaacgcgccaagcaattgcgcatcaccgatggccgcgatttgaaggccgaaatgggcccgattgtgtccaaggcagcgctggagcgcatcagcggctacatcgagcaaggcgtgcaagccggtgcgaaactgctgctcgacgggcgtgattacgtgccgaccgaagccgggttggaaaatggcttctggttgggtgcgacgctgttcgatcacgtgacccgagagatgagcatctaccgcgaagaaatcttcggcccggtgctggcctgtgtgcgtgtgagtgacttcgccgaggcgatcaagctggtcaacgaccacgaattcggcaacggcgtgagctgcttcacccgcgacggcaacatcgcccgcgaattcgcgcggcgcattgaagtgggcatggtcggcatcaacgtgccgatcccggtgcccatggcctggcacgggtttggtggctggaagaagagcctgtttggcgacatgcatgcctatggcactgaaggcgtgcggttctacaccaagcagaagtcgatcatgcagcgctggtcggaaagcatcgagcagggcgcggagtttgcgatgccggtgtccaggtaacccaaggcagccacattttgattgggggcgtgtctgacggggctttgcagattcagcagggaacgccgatctacccggcaacacatatcccctgtgggagctgtcgagcttcagcgaggctgcgaaagcgttgggtcaggtgacatctttatcggcaatgctgccgccttcgcaggcaagccagctcccacattttgattgggggtgtgtctgatggggcgttgcggattcagcagggaacgccgatctacccggcaacacagatcacctgtgggagctgtcgagctttagcgaggctgcgaaagcggtgggtcaggcgacatctttatcggcaatgccgccgccttcgcaggcaagccagctcccacattttgattgggggcgtgtctgatggggcgttgcggattcagcagggaacgccgatctacccggcaacacagatcacctgtgggagctgtcgagcttcagcgaggctgcgaaggcggtgggtcaggcgacatctttatcggcaatgccgccgccttcgcaggcaagccagctcccacattttgattgggggtgtgtctgatgggctttgcggattcagcagggaacgccgatctatccggcaacacagatcccctgtgggagctctattgctgagtctcaagcaattgatggcaggctctggttttctataacccgcttgatcgcctgaggcgattgcccaaaggcgcgcagaaacgacctgcgcatacgctcccggtctccaaacccgcattccctggcgatgatgtccagggaatggcgaccgtcctccatcatggtccgtgccgcttcgacccgcagatgctcaatggccttggccggtgactgaccggtttcatccttgaagatccggctgaattggcgcgggctcaaatgggccacctcggccagttcctccaccgacagttcggcgctcaggtgttcctttgcgtagatcagcgtgctctggatgcggtcggttttcgggtcaaggtccaacaacgtcgagaactgcgattggccgcccgagcggcgatggtgcaccaccatcttcttggcgacactgcgggcgatctctgtgcccaaatccttttctacaatcgccagcgccaggtcgataccggcggtcatgccggccgaggtccacagcgcaccgtcgatcacgaagatgcggtcttcttccatctttacgttggggtaggcgtcgcgaaacgcccgcgcgtacgcccaatgcgtggtcgcgcgacggccttccagcaggccggcccgggcaagcacgaaggcgccggtgcacacggcggtgatgcgttttgagggggtgtttcgcaggtagtcgagcagcccttgcgacgcgtcgtcgaggcggttattgccgatcacgaccagcgtgtcgtagtgcacacctttgaaagactgcgactccatgccaaagcccaaagaggagtgcacgatgccgccgtgctcggacaccaccgtcagctcataggactggccgtgcaggtcgttcgcggtttcgaaaaccgctgaaacggcgagccccagtacctggaagcccgggtaaatcaggagaccgatggttttcatagtgtgcactgctcgctgagaaggcgtgtcctaaaaaggtgtatatacgacatttgtgataggcaagggaagccgtatgttgagtgaccgaagtttgtcggctcactctcctggagacacccatgaatactgtagcgtccaagggcacggcccttatcactggttcgtccaccggcatcggcgcggtttatgccgaccgtttggccaagcgtggttatgacttgatcctggttgcgcgtaacgcagaacgcttgaacacgctggctgccaccttgcgcgcagacaccgggcgcacggtcaccgcgttggtggccgacctgaatgacaaggcggcgctggccaaagtcgaggctgtgctgcgggacgacgccagcattacgttgttggtcaacaatgccggcgtggggtcggtggcgtcggtcctgaacggcgatgtagaggcgatggacgccatgatcggtttgaacatcaccgcgctcacccgcctgacctatgccgtggccccggcttttgtggcgcggggggcgggcacgattatcaacatcgcgtcggtggtgggcattgcggtcgaggcgctcaacggcgtttacagcgcctcgaaatcctacgtactcagcttcggccatgccctgcaacgcgacctgggggacaagggcgtgcgtattcagagcgtgttgccgggcgcgacggccaccgagttttgggatgtggccggctacgcgccgcagaaggagagcgcgaacaccatgtcggccagtgacctggtagacgctgcattggccgggctggacctgggcgaacgagtgaccatccccgggctgcacgaaggccaggcctgggatgagtgggaggccggacgccgggcgctgtccggcaagttcagcaatgcccggcctgcggcccgttatctggcctgatgaggggtgctgggctggcccagctcccacattttttactgtgtttcaggtttgaggcattcgatagagcgatccacggtgctcttggccatctccagcaagtgccacaccgccagcaccttggcccgctcaggcggcggcagttgctcgccgcaatcgagcgcagtcgccgacgcactgtcgagcaagctggcggtgtagagcagggcgtcttcgaagctgaggtcttcgatttgaagatgtcgggtgggcaggtaatggtcgatggcgcggttgaaggcggcgcggtctttgagggtgtcgaggggtgggtcggggacaattttattcatcgtttagctaccttttggactcaggaagccgaaccgttcgcgactaaacgtaaggtggcggctgtgcgcaggttagtcgaccggtccaaaaggcaaaacccggcgcacccgaaggtgccctacgcacagccaccataaaactccatggagggcgatgcgccttttggaataccgggcgactaaacccgatcactgatgagcagtgacggaccgcagactagccaccgattccaagaggcacaaggcggcagggattgtctaggaaacgtcctgcaattaaaagggaggcggcttgctggccctttacaaaccatgaccaaatgccactaacgccaccgaatccctgtgggagctggcttgcctgcgatggcggtgtatcaggtgcctgatcagttggctgacccggcgccatcgcgggcaagcccggctcccacagggattcggtggcgttagcgccggccggtgcgcgtgctcacatccacccacaccgccagcaccagaatgctgcccttgacgatcatctgccagtaactgtccacgtcgagcatcgacatgccgttgtccaggctggtgatcaccaaagccccgagcaaagcgccatacacggtgcccgagccaccgcgcattgacgtaccgccaataaaacacgcggcaatcgcatccagctcgcccatgttccctgccgagggtgagccggcggcgaggcgggcggtgttgaccaacccggcgagggcgcacatcacgcccatgatgccgaagatccacagcttcaccgcctgcacattgatgcccgacaggcgcgtggcttccatattgctgcccaccgcgtacacacggcggccgaacacggtctggcctgtgacgtagctgaacacgccgagcaatgtcagcaacagcagcaccggcaccgggatgccatcgtagctgttcagcgtggtgacgaaggccgcgagtaccgcgccgattacggccacgcgcagcacgtcgcgcaccagggaatgcgccgccaggccatgcaccgcgcggttgcggcgttgtttccaggtcaggaacaccgtcagggcgaacagcaacacgccgagcccgatacccaccgaatgcggcaaatagccctggcccacatacaccagcgacggcgacaccggcgcaatcgtggtgccgccggtgatccccagcaaaatcccgcgaaaccccagcatgccgcccaggccgacgataaacgaggggatgcgcaagtaggcggtcatgtagccgttggccacgccgatcatcaacccgcacaacgccaccaggctcaggttggccagcagcggcacgtgatacaccacgtccagaatcgccgccagcccgccgagcaaacccagcaacgaacccaccgacaaatcgatctccccgctgatgatcaccagcaccatgccgcacgccagaattccggtgatcgacatctgccgcagcaggttggacaggttgcgtggcgtcacgaaaccgccctcggtctgccagctgaaaaacagccagatgatcgccacggcaatcaccagggcgagcattttgtagcgggtgaaaaggtgtttgacctggttcatctacgcgctcttgtgatggttatggttggcgccgagggcggcggcgaggacctgttcctgagtcaggccggcgttgacgaaatcaccgcacaactggccttcgccgatcaccagtacgcggtcggacacgcccaacacctccgccagttccgaagacaccatgatgatcgacacgccttcgccagccagcgtgcccatcagtttgtagatctcgtacttggcgcctacatccacgccgcgcgtgggttcatcgaggatcagcacgcggggcttggccatcagcattttcgccagcacggccttttgctggttgccaccggacaggctggtgatcggcaaaaacgggctggcggttttcaggtgcaggcgcgcgatttgctggtcgatgctgcccagctcggcttcggcatcgatgcgggtcaggtgggcgtagcggtcgagcacggcgagggtgatgttctggcccacgccgaagtcagggatgatgccctggcgcttgcggtcttcgggcaccatgcacagcccggcgcggatcgatttgagcggggttcgcgtatcgatcgactggccgtccagccacacctgggcggtataacggccgggataggcgccgaacagcgctgacaccagctcagtgcgtccggcacccaccagcccggcgatgccgaggatttcaccgcgcttgagcacgaacgacacgtcgtccacgcgtttgcgcctggggttgtcgacgtcgtaacacgtcacattgcgcgcctcgaaaatcacctcgccaatgtcacgcggctcggtggggtaaagggcgctcatctcacggcccaccatctgcgtgatgatctgcgcgatatccatgtcggccatggccgtggtcgcgatgtgtttgccgtcacgaatcaccgcgacggtgtcgcacacggccgccacttcatcgagcttgtgggagatgtacacgcaggccacgcccttggccttgaggtcacggatgatgtcgagcaacacctcgatttccgaacgggtcagggccgaggagggctcgtcgaggatcaacaggcgcgcccgtttgttaagcgccttggcgatttccaccaattgctggtgaccaccgccgtactgcgacaccggcagcgccacgttcatgtccggcaccttgagctcgcgcatcagtgcttcggcgcggtggatcattgccgggtagttcatgcgcccgccgggcaaggtcagttcgtggcccatgaagatgttttccgccaccgagaggtcgggcaccagggtcagttcctggtggatgatgacgatgccggcggcctcggtgtcgctgatggactgggccttgagcggttgtccgtcccagaggatttcgccctcccaggtgccgtggggatagaccgccgacagcaccttcatcaaggtggatttaccggcaccgttctcaccgcacaggccgacgcattcccccggtcgcacctggagatcgatgccattgagcgctttgacaccgccaaaggttttgacgatgccgttcatttgcagcaggtagtcggccatggcggtcactgcccggcaatctgctctttggtgtagaacccgtccttttccaacaggtcgatattggctttggtcagcggggtcggcgtgagcaggatggtgtcgacctttttgctgccgttgtcgtactgcgagctgtaggtgggtttttcattgcgcgccagttgcaccgagagtttggcggcttcggtggcgatcaatttaagcggcttgtacacggtcatggtctgggtgccatcgatcacccgcttgatcgcggcgaggtcggcgtcctggccggagatcggcaccttgcccgccagcttctgcgcggccagggcctggatcgcgccgccggcggtggcgtcgttggaggcaacgatggcgtcgatcttgttgttgttccgggtcagggcattttcgacgatgctcaaggcctcggtcgggttccattccttgacccattgctggccgacaatcttgatgtcgcccttgtcgatggctggctgcagcaccttcatctggccttcgcgcagcaccttggcattgttgtcggtgggcgcgccgccgagcaggaagtagttgcccttgggcgcggcttgcaacacaccgttggcctgcatctcgccgactttttcgttatcgaaggagatgtacgcgtcgatgtcggcattcagaatcagacggtcgtaggacacaactttgatcccggctttcttggcttcggccacagcgttggtcaacacggtggcgttgaacggcacgatgacgatcacatcgacgccccgggagatcaggttttcgatttgggaaatctgtttttgctcattggcgtcggccgactgcacgaagaccttggcgtcgagtttttcggcggcggcgacgaagtaatcacggtcgcgggaccagcgttccaggcgcaggtcatcgatggaaaagccgattttcggatgggccgggtcggccatcgccggcagggcgagcagggccagggcagtggcgagcagggtgcgtttgaatgacttcatggtggtgcgtccttttattgttgttggaagactctagacaaacactgtacctgtggctaacggaactcttgtgggcagcgggtttggggtggcgagcgggcttgccccgcgttggggcgcgaagcggccctgattcaagcaccacgttccttcaggcaaaaaacggttgccgggttttggggctgcttcgcagcccaacgcggggcaagcccgctcgccacaacaagcctgctgacctttgaaagccccgcttgccacagtgttaccggtagatgaagcggttgaccacgccctcaagcatttcctggcggccgcttacagcttgggggttcaactcatgggcaaacgcatgctcggccagggactccaggctgaactcacccgccagcaccgcctggcccaatggctgattccagccggcataacgctggtccctgaactgctgcaattgatcgttctgcaccatcgctgccgcacgttccagggcgagggcgagcacgtccatggcggcgacgtgaccgtggaacaggtcgacttcatccaggctttggcggcgcactttggagtcgaagttgtagccgccgttcttgaaaccgccagccttgaggatttcgtaggtggcgagggtcatttcctccacgctgttggggaactggtcggtgtcccagccgttctgcgggtcgccacggttggcgtcgatgctgccgaaaatgcccagggacacggcggtggcgatttcatgatgaaaactgtgcccggccagggtcgcgtggttggcttcgatattcaccttgatttcatgctccaggccgaactcatgcagaaagccgaacaccgtggcgctgtcgtaatcgtattggtgcttggtcggctcctggggtttgggctcgatcagcaagtcgcccttgaagccgatcttgtgcttgtgctccaccaccatgcgcataaagcgccccagctgttcgcgctcgcgcttgaggtcggtattgagcagggtttcatagccttcacggccgccccacagcacatagttggcgcccttgaggcgcagggtggcgttcattgcgctgaacacttgcgcggcagcaaaggcgaacacgtgcgggtccgggttgctggcggcgccggcggcaaagcgcgggttgctgaagcagttggccgtgccccacagcagttggatgccggtctgttcctggtggcgctccaggtggtcgaccatctgcgcgaagtggtggcggtactccttgagcgagctgccttcaggggcgacgtccgtgtcatgaaagctgtagtaatcaatgcccagtttggagaaaaactcgaaggccgcatccgccttgccgatagccagctccatcgggtcgccgctgcgttgccacgggcgtttgaaggtgcccatgccgaacatgtccgccccgggccacacaaaggtgtgccaatagcaggccgccatgcgcaggtgttcgcgcatgggtttgccgaggatgagtttgttggcgtcgtagtggcgaaaggcgaggggggaatcgctgttggggccttcgaagcgaaccttctcgacaccggggaagtacggcatggtgttttccttattgttcttggcgatgccccgatactagcaacggcccctggcctgccgattatgaaaatcaccaaggtgtggtgcgattttgcgtggcgggggctagtctgtggcgactggcctatggataaaaacaatgaaaaccctaccgcccgttcaccgcattgccctgctgttcaatggcagcaaaatctatgaccgcggcatcatcgccggtatcggcaactacctgagcagcacccgtgtgtcgtgggacctgtttctggaagaggattttttgtgccgtctgcgcggcatcgagcgctggcagggcgatggcatcatcgccgatttcgacgacccgttgattggtgaggcgttggccgacatcaagttgccggtggtggcggtgggcggttcctacgaggatgtgcgggcctatcccaaaggcattccgtatgtggccaccgacaattacgcgctgatcaagctcgcctatgaacacctgattgaagccggcctgagccggtttgcctgcttcagtctgccggtggctcaagccaaccgctgggctcaggagcgcgagaaagcctttcgccgcctgatgcaacgcgatggtttgcaggtcgagatttatcgcggcttgggcaccagcgcgccactgtgggacagtgccgtcgaacagcaaattgcctggctgcaagccttgcccaaacccatcggcatcatcgcggtcactgacgcccgcgcccgccagttgctgcaagcctgcctcaccgccggcattgccgtgccggaagaggtcgcgctgatcggcatcgacaacgacccgctgactcgcaccctcacacgcgtgccgctgagttccgtgatccagggcaccgaaaccatgggccgcaccgccgccgcattgctgcaccagatgctgcacggcaaacccgccgcgggcacgcagattctggtgccgccggacgcgatcaatgtgcaggcctccagcttgcatcaaccgctgggcaacccttacgtgatgcaggcgctgctgtttattcgccaatacgcttgccagggcatcaagaccgcccaggtggcggcgtatgtcggcgtgtcgcgttcctccctcgagtcacactttcgcaaggcgcggggttgcagcgtgcacgacgaaatcctgcgctttaaactggcagcggctgccaaggggctggaagatcgtgcgttggcgattgctgacgttgccacgcgttgcgggttcaaatcggcgcagtacctgcacaccgtgtttcgacgcgagtttgggtgtacgccgcgggagtatcagcacacggttgtttgacaacctgtgtggaaaaagggaaagggagaaggatgaagaggatgcggtattactggctcaggccgaaacttgcaatgccgggtaaatgggtgttgggaagcatacgccacgttgataactggctcttcaggcacccgcctgctgagtttatggaaccgtgcacctacacgcttgacgtgctgcacgacggtgcagaacgggactactcggttgccgggtatgccagtgttccggtgttgagccaaagggcctgtgaggccctggcgggtttgcccgaggtggacgaaccttatcaccacgtcgtgcttgagccggtccgcatcgcgaacaaggccgtgtcgcaggattattttgtgatggtcatcgagacccaggtcgactgcattgacgaacagcgctcggcgtttgaacgctttgcggtagacgatcctgtgaggccggatctggcagggcaatacagctactttttccggctcgtcatcgacccgtcgaaaacaggcggtcgccatatcttccgggtcaaggactacctcggcgcaattatcgtcagcgaagaagtcaaatgtcgtttcgaggccgctgggctggtcgggctggtctttgattcggttgatgctgactgaccctcgacggttttatggccggggtgcagcggccgcgcacccggcaatcacccggtcagaaaactgctttcacctgcagccccaccaccagcgcattgtcgatatccaccccggaaaacgcccccggctcaatgatgtactgcacatccgggcgcaatgtcagccatggcgtggcctggtagccataactcagctcgatcaactgttcggcgttgttcaggttggggtagtccgccccggcgttgaacgccgtttgcgcctgcacatcgcggctgcgcgggttgggcacggcgcggccataacccagggccagcgtatcccgtgggcggccttcgaacggtttgtacagcaccacgcctgcgccataccagtggctgaacggcgaggcggcttcgctggcggcggagtattggccgaaggcgtgcagcacgcgcccggcggatgaactggacgcccacaccgcctgatcaatcagcaggtaatgaccgccacgcccgctgactttcttgtcgctgccgatgcgtttcacatcggagctgtcgtagtaataaccgagcttgtattcacccggcagggcgccgacgtgtttgtagaccagttcaatcggcaccacggtgccggtggtgcgtttcgggtccaggcgccaggcgcggctggcgttgccgttgctgtcggggtccacattgaaggcggccacgcgcagttgccaactcggtgaaaaatcgtatttcacccgggcgcccaggcgtgcgttcgggtagttggtccagccgctgccaccggacatgttcagcgggtgcccgcagaaaccggcgttcatgaagttgcacaggatgccgctgtcgaggccgccaaggtcgttgcccatggccatgtagccgagcttgatgttcagcgcgggggtgaacagcgtgcgctcgtaactcagctcggtgaggcgggtgtagaggccgccatagttttcctggatcggcaggcggttgcccaccaggtcctcggaggcgctgttgccgcgacggtcgttgatcgtgacctggatgcggtcgccatggttgaaaccgtacagcttgcccaggtcaaattgcacgccgagcttgatgttctgcgagtagcgcgccgagcggtgttggccgccgtcggcgttgtaggcggtctcgccgctgtagtcgccggtaaagcggatgccgtgttcgtcgagctcgcggcgcaggccgctccagtcgccggtcagggtggcgtcgtcggcttgtacgggcagggcggcgcccagggccaggcccagcagcaggcgcccaagggaaggatgagaagtgggggtcatgcgaagtgttccaggcaaaaaaagcgcggtgccggtgcgggcaccgcgcgaacaaaggttagggcagggcgtaggcgatcacgtagtcgccacggtcggtggactggcgcgcaccgccggcggtgatgacgatgtattgcttgccggttttcggcgacacgtaggtcatcgggccgccctggctgcccacgggcaagcgggctttccagacttcatcaccgttgccgctgttgaaggcgcgcaggtagaaatcctgggtgccggcgataaagatcaggccgccctgggtcgacagtgtgccgcccagcgtcggcaaaccaatcttgatcggcaagtgcatgcggatacccagcgggccggtgtcttccaccgtgcccaccggcacttgccaggcgatcttctgcgtcttcatgtcgatggcggtcagggtgccgaacggcggcgcctggcacggaatgccggccaccgacaggaagcggtttttgttcaccgcatacggtgtgcccttgagcggtaccgcgcccatgccggtgttcagcgcttcaccgccggaggaagcctgggcatttttttgccccggcaccatctgaatccacaggccaaggcgcatgtcgttgacgaagataaaaccatgcaccgggtcggtggaaatactgccccagttcatgccgccgagcgaacccgggaaactcagggatttatccgtgcccggcgcggtgtacaggccttcgtaacgcatgcccttgaagtcgatgcggcacagcaattggtcaaacggcgtggcgccccacatgtccgactcggtcagggtttgcgcgccgatctgcggcatgcccacggattctggctgggtcggcgagtagggttcgttgggaatgttggcggccttgaccggcacttcgcgcacgtcggtcaacggcttgccggtggcacggtcgagcacgtagatctggccggctttggtgccgatcaccaccgctggcaccgccttgtcgcctcccggcggggtgaagtcgatcaggctcggctgcatgggcaggtcgaagtcccacaggtcgttgtggacggtctggtacacccacttttcagcgccggtggaggcgtccagcgccagcaccgaagcaccgtatttgtggttgagctgcgtgcgttccacgccatagatgtcggtggacgagctgcccatcggcaggaagacggtgttcatcagcgggtcataggacatcggcgcccagctgttcggcgtgctgcgcacataggtgctgccttcagccggggcttttttgtcttcagggttgcccgggtcgaacgcccagcgcatttggccggtgatcacgtcaaaaccacggatcacgccacccggcatgtcggtttgcacgttatcggccacgcggccgccgaccaccacggtggtgccggcgatcaagggcgcggaggacagttggtagtagctgtccggcacgttgcccaggccggctttcagatccacctggccgtgggtgccgaagccttcgcagaattggccggtgtcggcgtccacggcgatcaggcgtgcgtcgatggtgttggtcagcaagcgacgctgacactgcgcaccggccggtacgctggcggcgatgatcggcgagctgttgggctgggtcggctgggcgagtggcgcggtggcgtcgaaatacgccatgccccggcaacgttgccacaccgccgacttggcgttgacttcgttcttccacagctctttgccggtgtcggcatccagggcgatcaggttgttgtgcggggtgcagatgaacactttgttgccgatctgcaggggcgtgagctggtcttcagcgccgttgccgtcgctgatggccacgtcgccggtgtggtaggtccacgccactttcagcttgttcacggtgtcgcggttgatctggtccagcgcggcgaagcggctgccgccttcggtgttgccgtagtgcgcccagtctttctgggcgtcagccggggccaccggggtgaggcccgggcctgcgcctgtcggtgccacgcttgggtgggcgacaaacatgttgcccgccgcgactgctacgcccaaggccagcactgcggcaatgccgtacgcactgcgtgcagggcggcctgccagcagcgggtagaccaacgctaccaccacgccaatggccgcaaacatgaacagccgcgagaacaacggccagaacaccagccccacgtccgctatcgcccacacggccgtgccgaccaggaaggtggcgaacaaccacgcacctgccggcctgcgctgggcgatcagcacgccggaaacggccattgcgccgccaccgatcaggaagtaccaggaaccgcccaggctggccagcttggcgccgcccaccgccagggccacgccgagcagggcaatgacaatgcccaggcccagcaggagatatcgtgaggcgccagcggcgcgggatgctcgtttcatgtcggcaggactcgaatgtgactgactaaagggcgaatcttagcaagataagtaaccagttagtacattagagtcctgcaatagactattacagctgcggtgaagatgagacgtggtcaaatgccgcgccgcgctggcggatttttcagccaggtatagaatcgcctcattcaggcctttgaggttcccacatgctttcacccacgccactgcgcgtgctgatcggcttttcgccgcgcagcgcttccgatgacctgctcaacagcatggccccggcactcggcgccgcgttgggtcgcccgatccagctcgaactgatgcccggtgaactcggtgccaaggccgcccgcgcgttggtcgccggcccggcggacggcaatacgctgctggtcgccacgttcggcacccacgccatcaaccccaatctgcgtgatgacctgggctatgacccgctgcacgatttcgagccgatctgcctggcgacgcgcgcaccgctggtgctgggcaccggtttgcctctggaaaatctgcaggcactgattgagtcgggcctgaaccagaccctgacctacggcagttcaggcgtgggcagcgcgccttatctggcgggtttgttgttcgcgaaacttaccggcgtgaggctggagcaccgcgcctaccccgacacgcgcgaactgtatgtggcgctcgaggagggccgcctcgacctgagcttcaacaacgcggcgaccatgctgccaaaggtgcgcgaaggggcactgcgtgcactcgccgtgactacgccgcagaggtctgtggcgctgcccggcgtgcccaccctggaagaagccggcctgagcggttatgcgttgaacaactggctgggcttcgtcgcggccaaaggcacttcaccggcgaccatcgccgtgttgaaccgcgcaatcgccctggccttgaacgcccccgacacccaggcgctgctcctcgaaaatggcattgaaaccgtggccggcacgcccgcgcaattcgcccggcacatggccgatgaactggcgcgctgggcgtggctgcgcgattgaaacgtgcaaggcctcaggccaacgcatcgcgctgcatcgactgcaggttcttctcgatggtttcgcagatggtctccatctggatttggtgttcactggagtgaaacgggctttgcaggtcggtgccgatgcgttcgatcgccagcagcataaagcccaccacggtcgaggccagcggggtgaaccagcccagggattcgaccaggcccaccggcacgatcaggcagaacagcgagatgaacaggcgcgggaaatacacgtaggggtagggcagtggcgtattggcgatgcgctccatgccgccttgcgcgttggacaggtccaccagcgtagactccaggcgcgccaggcgaatactgtccaggcgcccggcctggtattcgcgcgccagcagcgtggcggaaccggtgagaatgtcgttggcgaagttattggtagcgccattgcgcgcgaactcttcgccgggaatgaatgcgcgcacttcctccgggcacggctggcccttgaggtgcgccgcgaggcagttcacataggcgacgtgacgccgcagcagggtggacttgatcgggttgacctcgccgtccgggtcatcgagcagggtcagcacctgccgggcgaaactgcgcgaattgttgaccatcgcgccccacagggttcgtgcttcccaccagcggttgtaggcgctgctgttgcgaaaactgatcagcaccaccagcgcggaaccgagcaaggtcaggggcatcaacggcagattgatcttggtggtaagaaacagcatgaagtccaccgtcacggcgacgtcccacaacaacagccagaacagggcccagcccacatagcccatggtcttgatgatcaggcggtattttttgatgatggcggctttcaaacgacaacctcacggcgagcagatggcaacaatgccttagctcggacgcgggtttggggggaaaggttcggcgataagcatcgcgaaggctgaatcgtttccgaatggcggcatttcagccctcgacaggctcaatcacatgcggcccgtcatgccgcggattacccaccgcgccgtctacccggaaccactcaaacacttcaggcggttcgccctgaaacagcaccatttgctcggccctgcctcggtgggttgccgggtccagccattcccgtgccagcatcgggttcagcaccaccgggcggcggtcatgaatatcgaccatgccgccggcgctgtcagcggtgatgattacaaacccgtcgtgttcgcccgggccttcatcggcgtccggtaactggccaatcgcagcgcaaaaggccggggcgccgtcgcggcggcgaatcagatagggctgttttttcgggccgccttcgtccacccattcaaaccagctgtcgatgggcgcgagggcgcggtgcggccagatagcacggaagaacgggccgttggcgaccttctccacccgcgcattgatcggcggtgcgcggtctttggcccagtgcgggcgccagccccagcgcacgcggtcggcgtgcagcaggtcgttgtccacatgcaacagcgcaacaggcgtggagggcgcgacgttgtagcgctccaatggctgctcgcccacgctattgaccagggcattgggcatgctcaaggccgccacgaaatcatggatgccccggtactgcgtcaatcgtccgcacatggctgatccctcaggctgtcacctgagcgtagccgctgcatcgcaggccggggccggttgtttattcgatcgggtagcgcttgaaggctggatgctgttcaagtcgttcggcgtggcgtttcaggttgggaaacgcctcagccttgaccaccgaggccacggtgaactggctgaacgaccaggcgacggccgccgtaagggaggcctgggtcagcgcgccgtcatcgggcaggtgtttttccagcaatgtataagccgccagcaactggccgctgacgcgctcgagccacggtgcgtgctgtttctcggccgggcgcaggttgtgttcatacacgatctgcacgcttttttcgcacgccgccagggccagcccgagcacctgcacatcacgggcgcgggcgctgggggactggggcagcagctttttgtcggccggcgccagggcttcgaggtaatcgaggatcaggctggaatccattagcacggtgccatcgtccagtaccagtgtgggtgccttgacgaccgggttgatctggctgaactcggcgaagtggcgaaacaccgagagtgcttgatgctcgaaggggacgccgtacaggtccagggaaatggccacgcgacgtacgtagggcgagtccagcatgccgatcagtttcatgaagcctccattgcattcaaaccgttgggctcaggagattaagggctgttgatcggcctgcgcaatggcggcttgcagtagccggtaagcgtccaccaattgttccaggctgaacgccaggttgcgcccgctggggttgggcaacacccataccgcgacgtcgcccaacagttgcggctgcaacccccagtcgagctggcgttggccgctcagtgcgctgtaaccggccttgcccagaaacgccacgaagcgtggccggcagcggcggatcttctgttcaaacgccgccgctgcatccttgaactcatgccgcgccaactcgcccgcgctggccgtggggcgctggaccaccgtggtcaggccgcagccgtagtcaagcaacgtcggcccgtgttcggggcggatttcgtggggcgtgaacccggccaggtgcaaggtgcgccagaagcggttgctgcggttggcaaagtgcaggccgagggcggcggatcccttgccggggttgatgccgcagaacaccaccgacaagccttcggcaaggatgtcttcaagccggtccgtcatgtcgggtctacctgcagatgggtcagcagccacgcggtaaaactgcgggccatggggtcggattcactgtcgcgatgagtcaacaatgcccaactggggccgcgaatggtcgcttcaaccaagggcgtgagcaacccgtcttcctgggcctggcggctcaacagctggctgaccagaccaatcccgagcccggtgcacaccgcgtccagcaacaggccgggatcggaaaaattcaaaccctggtcctgttgccccacatcaatgcccgcttctaccgcccaatggctccagtccatttcccgctcgccgtgcagggtggtgcgctgctccttcggcacctgcaacacgcgcgggtggcacgccggaaacaagcggtcggcatgcagcaccttgaagctgcattcagcctgggagctgatgtcgtcgcgcaccgccaggtcgatggtctggctggccatgtcgggcacctcgtcggtgctgaagatccacaggtccacttccgggtgctggcggcggaagtccgccagacgcgggagcaaccagtgccgtgcaaaggtcggcgtggtgttgagcaccagttggttgggcttgcggtattgccccagccgccgcacgccgaccgccagttgttgcagcagggcctgggtggtgctgagaaaatcataaccggcatcggtgaggctcacgctgcgcccgctgcggaagaacagtggctgctccagataggcctccaggctgcggatctgctggctgattgccgattgggtcaggtgcagttcttcagccgccttgtggaaactgcccagccgggcggcggcttcaaaaccgcgcagggtgccgaggggcggccagtggttcaacatgctgataagttcctctaatcagttttctacaaaatccatcgtttgtttggccttttgagccaccgtagcatgcatgccaagactccgtgggcagttttcactgaacacaatgacttaactcaaaggtacttgtcatgcagcgcaatgaaattccaagcagtggttggtggatgcccgcggagtgggcgcgtcacgtggcgacgtggatggtctggccgcataacaaggccttgtgggagaccacgtggggcgtaaccctggcgcaggtgcaggaagatttcgcccgggtcgccaacgcgattgcccggttcgagccggtgaaaatgattgtcgactcctcggcggtggccagtgctaacgcgctgtgcgggccgggggtggagttgatcgcccaggcggtcaacgacagctggtgccgcgactccggcccgagctttgtgtgccacccacaacagggcctggccggggtgagctggcgcttcaatgcgtggggcggaaaatcggctcacgatctggatgaaagcctggcacgccgggtgctcaaccacttggggctggagtgcttcggtacgccgttgagcaacgaaggtggggcgattcacgtggacggcgagggcacgctgatcaccaccgagtcggtgctgctcaaccccaatcgcaaccccggcgtgaccaaggccgagatggaggagatctttgcgcgcctgctgggcatcaagaagaccatctggctgccgggcgacccggattacgtgaccggtgacatgactgacggtcatgtggacggtatttgcgccttcgcacgccccggcgtgctgctggtcgacgccacccgcgaccaaggttcggtctacgccgaggtggtgcgcgaaaaccgccgcgccttgcaattggccaccgacgcccagggccgctccttcgagatgatcgaactctacgaggccaccgatgcggtggacacggaggctgaagtgttctgcgcctcctacaccaatttctatatcgccaacggcgcaatcatcatgccggcctacggcatcgccgccgaccaggtggccgcccaggtgctggcccacgccttccccggccgtgaaatcgtgccggtgcagatcaaccatctggcccatggcggcggcggggtgcattgcatcacgcaacagcaacctgcctggccattcaaggggtaatgccatgaccgttttgaccatcgcgactactcagatgccgtgcagctgggacttgccaggcaaccttgaccgcgccgaacagctggtgcgcgacgcggcggcccagggcgcccaggtgatcctgttgcaggaactgttcgccacgccgtatttctgcatcgagcagcaccacaagcacttggcgctggccgaggaatactcgcgcagccaggtcctcaagcgctttgccgcactggctcgggaattgggtgtagtactgccgctgagctggtttgaacaagccggcaacgccttcttcaattccctgagcgtggccgacgccgacgggcaactgttgggcgtgtaccgcaagacccatatcccgaatgccatcggctatcaggagaaggaatatttcagccccggcgatacgggctttcgcgtgtgggatacggcattcggccgcctcggcatcggcatctgctgggaccagtggtttcccgaaaccgcacgctgcctggccctgcaaggcgccgaagtgctgctgtttcccaccgccatcggctcggaacccggctgcgccacgctggattcgcgtgaccattggcagatgaccatgcgcggccacgcggcggcgaacctcgtgccggtggtggcggccaaccgcgtcgggcgtgaaaccgcaaccaccgacgcaggcctgcaaatggacttctacggatcgtcgtttatctgcgaccacaagggcaaattgctcgccgaagccgaccgcgacagcaccggcgtgctggtgcaacgcctcgacctgtcagccatgcgtgaagagcgcctgacctggggcatctttcgcgaccgtcgtccgcacctgtacggcgcgctgttgaccctggatggccgcccagcatgaaaacactactgagctgcaccctgatgctcgcggctgcctgtgcctcggcggatgacaaaaccctgaggctctacaactgggcggattactttgccgccgacaccctgtcgcggttcaccgccgaaaccggcatcaaagtgatctacgacgtgatggacggaagcgaaaccctcgaagccaagctgatggccggcggcagcggctacgacctgatcttccccggtgacaccgtggccgaacgcttgatgcgtgcgggcgccttgcagcccttggacccggcaaagctgaccgagacggacgacatcgaacccggcctgcagaagctgcgcacccactacgttcattcgaacaaagccacagtgccctacacctggggcaccatcggcctgacctacaacactcaacaggtccagcagcgcatgccgaatgccccggtcaacagcctcgacttgctgttcaaaccggagaacgcggccaaattcgccgattgcggcatttcgctgatcgactcgccggacgaagtgcttgccgtggtcctcaactacttgggccgcgacccgcgcagcgccaagcgcgaagacctggcagccgccagtgatttgctgctcaagctgcgcccttacatccgcaagttccagtcgcagccagtgaccgacctggtcaacggcaacctgtgcctgtccctcggttacagcggcgacatgacccaggcccaacgcgccgccgatgccgccggcaaagccgtgacgttcggttatcacatcccgcgcgaagggaccacggtgtggatggacaccctggccatcccggtcgacgccaagcacccggaatacgcctacgcatttatcaacttcgtgatgcgcccgcagaacatggcggccatcagcaacttcaccggctaccccacggccaacgccaaggcccggccggcggtggaggcgagcatgcgcgacaaccccgaaatttacccggacgcggcgacctttgatcggctgattgccggcaaagacatttcccaggccgatatgcgcgcgcgaatgcgcgtgtggactaaattcaagacagctaccgtcaaataattgtggataacgcgcttcctgtggcgagcgagcttttgtggcgagcgagcttgctcgcgctggagtgcgcagcgctcccgctttttttggggccgctacgcagcccagcgcgagcaagctcgctcgccacaaaaagctcactagccacaaaaagcctcgctcgccacaaaagcacagttaactcccgttcaacccaacaccgcactcccgagaccaacatgcccactcgccgcaccttcatcaaacaaaccagcgtggtctgcgccatgaccctgatcaacacccacgtacgcgccgcggttggcgggcgtttctacatgcccgatgagggcgaaaaacaccgccaggcgtttattgcctttggcgcccaggacgcgatctgggaagacttcaccgccgacgtgcaggccgccctcggccgcattgcccgcgccatcgcggcctatgaaccggtcaccgtattctgccgcgaggacgagcgtgcactggccgagcagcactgcggcacgcgcaacatcacctttgtcgaaaccgagctggacgacatctggatgcgcgacaccggcgccaactttgtcatcgacggcaccggcggcatcggcgcggtggacttcaacttcaacggctggggcaacaaacagcagcacgacgaagacgcgcaactggccggccgggtcgccgaagaaaccggcgccaaacacgtccgcagcgaactggtgggcgagggcggtggcatcgaagtggacggcctgggcaccggcatcatgaccgagagcagttggatcaaccgcaaccgtaaccccgactggagcaaggccgatgtggaagccgagctgaaagagcgtctggggttgcgcaaaatcatctggctgccgggcatcaagggcaaagacatcaccgacgcccacgtcgatttctacgcgcgctttgtttcgcccggcgtggtgctggccaacctcgacaccgacccggagtcctatgaccacaaggtcaccctggcgcacctggagatcctcaagaacgccaccgacgccgatggccgcgcgttgcaggtgcacaccgtgtcgccgccgctgagcccgcgcaaaagcaagttcagcaaaggcaatgaggattttgcagcgggctacatcaactatttcgtgatcaacggcgcggtgattgcgcccgagttcggcgacgcggtggcggaccgcaaggcgctggacctgctgacgcggctctatccgaaccgcaaggtggtgcagttgaatatcgacgccatcgcggcgggcggtggcggtattcactgcgtgaccaaccaccagccaatggcttagtcgtttttggcaagcaactgacgggcgaaatcgtcggaggcgataaagtccagggtctggcgcagttgcgccgccgcttcccggccgaacgcttgatcaaagcgctcggccatttgcgttgaaatacgcctggctttggcatggatgctgacgccggcatcggtcagcagcacacgacgggtgcggcggtcgagttcgtctacgcgcaactccaccagcccgtcgcgcaccagcggtttgagcgtatgccccagcgccgacaaatccatcaccagggtctgtgccaactcacccattttcggcgtgccggccttggaaatatggttgagcacagcgtactgcgtggctttcaagccgcagggcgcataggcctcgtcatagatctggcccaggcgccgggacgtgcggcgcacggcgccattgacgcaggcgctggggctctcggagcagggcggtgcagatttcaagggcaaatactctctgatacaaaacgcgacggagttgattatgcctgccagcgccgtcaggacaaggcctttgaggccgaggatgaataccggtacaggttggaaccgcaaaggtgaatattgagacagcttgaaacaaattagttgcgtacgccactaaattggatatcgtggcctatgcctctttgtgacccggatgtcgttgcaaactccccaggatgcgcatggggcgaggcgggaaacggcacggctctgcctgcttgaacgtccaacccctgtctggatcacctcctatgctgagcctcgtgcgcatcgcattgctgcgcccctataccttcctggtattggccatcttcatcctgatcatcggcccgctggcggcgtggcgcacgccgactgacatctttcccgaaatccgcatcccggtcatcgccgtgatctggcagtacaccggcttgccgcccgaccagatggcggggcgcatcacttcgccgttcgagcgggtgctgaccaccaccgtaaacgacatccgccatattgaagcgcagtcgatgaacggctacgggattgtgaagatcttcttccagcctggcgtcaacatcagtacggccaacgcccaggtgacgtcggtgtcccaggcgatcctgcggcagctgccgccgagcaccgtgccgccgttggtgctcaactacagcgcctccaccgtgccgattgtgcagcttgctctgtcagggccgggcttgagcgaacagcgcctgggtgacatcggcctgaaccaggtgcgcctgatgctcaccagcgtgccgggcgcggcgctgccgtacccgtttggcggcaagagccgccaggtgcagattgacctcgattcggcgcgcatgcaggcccgtggcctgtcggcgcaggatgtggccaccgcgctggcgacccagaacctgatcacgccggtgggcacgcaaaagatcggcagctatgaattcaacctgcaactgaacaacgccccgtcggacttccatgacctggaaaacctgccgatcaaaaccgctgacggcaccacggtattgatccgcgacgtggccaccgtacgcgacggcaacccgccgcaaaccaacatcgtgcatgtgaatggcaaccgctcggtgctgctgccagtgctcaagaccggttcggcctcgaccctgggcgtgatcgccgggatcaaggacaagctcgccgacaacaaggccgcgttgccgcccaacctgaacatcgacctgatcggcgaccagtcgctgttcgtgcgttcggccatcagcggcgtggcccgtgaaggcttgatcgctgcggcgctgaccagcctgatgatcctgctgttcctcggcagttggcgctcgacggtgattatcgccacctcaattcccctggcgatcctcgcctcgattgccacgctgtcggcgctcggcgaaaccctcaacatcatgaccctcggcggcctggccctggcggtggggattttggtggacgatgccacggtgaccatcgaaaacatcaactggcacctggagcagggcaagccggtgcagacggcgatcctcgacggcgcggcgcaaatcgtgaccccggcgtttgtgtcgctgctgtgtatctgcatcgtgtttgtgccgatgttcttcctcgatggcgtggcgcgttttctgttcgtgccgatggccgaagcggtgatctttgcgatgatcgcctcgttcctgctgtcgcggaccctggtgccgaccctcgccaactacctgctcaaaccccacgtgcatggcgaagacgggccggcgccgacgcgcaacccgctggtcaacttccagcgtggtttcgagcggcgttttgaagccttccgcgagcgctaccacaaggtgctggacagcgccttgcaccaccgtcgtaccgtggtgatcggcctgcttgcgttcgtcgccgtctcgtttgcactggtgccattcctggggcgcaatttcttcccggatgtggattccgggctgatcctgctgcacgtacgggccccggtgggtacgcgggtggaaagtaatgcgcacctgatcgccgagattgaaaacgcgattcgccgcaaagtcccggccagcgaactcaaggccttggtcgataacatcggcttgtccatcagcggcatcaacgtggtgtacaacaacaccggcaccgtgggctcccaggacagcgacatccagatcagcctgaacgaggggcaccgcccgaccgccgagtacatgcgtgaattgcgcgagaccctgccacgggaattcccgagcgcggtgttctcgttcccggcctcggacattgtcgggcagatcctcaacttcggttcttcagcgccgatcgacctgcaaatcaccggcaataatctggcgggcaacttcacctatgccaacgcgttgctgcgtgacattcgccgggtgccgggggtggtggatgcgcgtatccagcagtcgcggcaactgccgacgttcaacattgacgtggaccgcacccgcgcgcaattggtcggcctgaccgagcgcgacgtgaccaacagcctggtcgtgaaccttgccggttcgagccaggtggcgccgaccttctggctcaacccggccaacggcatttcctatccgatcgtgatgcaaaccccgcagtacagcctcgaaagcctggcggcgctgcataacctgccactcagtggcggcagcggggcggcggcggaccagacccttggcggcctggcgaatatccagcgcagccacagcaactcggtgatcacccagtcggatatccagccggtggttgaagtactgaccgcgatccaggaccgtgacctgggcggcgtcgccgccgatattcagaagatcatcacggcccacaccggtgaagtgccaaccggttccaaagtgatcctgcaaggccaggtgcagaccatgaacgcggccttcagcggcttgctgtttggcctgctcggcgcggtggtgctgatctacctgctgatcgtggtcaacttccagtcctgggccgacccgtttgtgatcatcaccgcgctgccggcggcgctggcgggcattgtgtggatgctgtttatcacccacacgccgctgtcggtgccagcgctgacgggggcgatcatgtgcatgggcgtggccaccgccaacgccatcctcgtggtgagtttctgccgcgagcgcctggcggtgcacggcgatgcggtgcaagccgcgctggaagccggcttcacccggttgcgcccggtgttgatgacggccatctcgatggtcatcggcatggcacccatggccctgggcctgggggagggcggtgagcagaacgcgccgctcggccgcgcggtgatcggcggcctgaccttcgccaccatcgccagcctgattctggttccactgattttcagccttgtgcacgggcgtcgccaacacgcgccgcttgcgaccaccgttaccgtaggggtttgacatgtccgtttcccattctcaaccgaagtcttcccgtggcctgctctggcttatcgtcggtggggtcgtcgtggtggtcatcgtcggtgtcggcatcggcgtgcgcgccagtgagtcccgtgacctcaagacctggaccgacgcccaggcgctgcccagcgtcaacctggtcaaaccggtggtgcaagcccaaggcccggtgctcaacttgccggggcgcatggaagcgtattcccgcgcgtcgatttttgcccgggtcaacggctacctgaaatcctggaatgtcgacatcggcactcgcgtcaaagccgggcaagtgctggctgaaatcgacaccccggaactcgaccagcaactgctgcaagcccgcgccaccctggcatcggcccaggccaacgcgaccctcgcgcaaaccaccgccaaacgctggcaggccatgctggtcaatgactcggtatcacgccaggacgtggatgagcgcaccggcgacttgactgccaagctggcccaggtggcggcggccaaggccaatgtcgagcaattggttgccaccaaaggcttccagcatctggtggcgccgtttgccggtgtggtcacggcgcgcagcacagacgtgggcgccttgatcagcgccggcggcgcggccggtaaagagctgtttgccgtggccgatgtgagccgcctgcgcgtgtacgtgcaggtgccgcaaaccttctcgccgcagattcgcgaaggtgccacggcacgcttgagcgtgccggaataccgcggtgaaaccttcaccggcaaggtgatcgccaccgccgacgcggtcaacgccgcttccggcagcaccctcgtgcaattgctcgtggacaaccccggtggccgcctgctgccgggtggctacaccagcgtgcagttcgacctgccggtgcaggccgacgtgctgcgcattccgtccagcgccctggtgttcgatgacaagggcatgcgcgtcgccaccctcgacacccagaaccacgtgcacttcaaaaccatcagtatcgcccgcgattttggcgacagcgtggaaatcgccagcggcctgcaagccgccgaccgcgtgatcgacacaccgcccgacggcctggccgatgacgattccgtgcaactggctgtcgccgccactgaggtcaaaccccatggctaagcgcaccctgctggggctgctcgccaccttgagcctgggcgcctgctcgctggcgccgccactcaaggtgccgcccgccccgattgccgcacagttccatacccaagggccgtggaccgtcggcacgccgaatgatcaggccaaccgtgatggctggtggcgcatctacaacgacccgcaactggacgcgatgcagcaggagctgttgaaaaacaacgccgacctgagcgcggcactggcgcactatcaacagtctcagggctttgaggcgcaggcgcgttcagggctgtttccgaagctttcggccatcggcaatggtcagcgcattcgccagtcggacaaccgaccgttgcgctccgccacttcgcccgatacctacaactcggccacgcttggcctggaagtggactatgaagtcgacctgtggggccgcgtgcgcgacaccgttgccgccggcaccagcgattcgcaggcggccaaggcggatctggcgtcggtacgcttgagcctgcaagcccagctcgccgacagctacatccgcctgcgcggcatcgactggcaaaaccagttgctggaacagacccgtgacgcctacgccaaggccctgaacctgacggaaggcctgcacggcggcgggattgtctccggcctggacgtggcgcgggcgcgtacgcagttgtcgacggtcaagtcgcaactgacccagctgcaggtgcagcgcgcggtgctggaacattccattgcggccatgctcggcgagtccgcttcgacctacagcgtggctgtcaacgtcgcaccgatcgccttgccgaacgtgccgaccggcgtgccgtcgagtctgctgcaacgccgtccggacattgcggcggccgagcggcgtatcgcgtcagccaatgcgcgtatcggcgtggccaaggcggcttggttcccgcagatcaccttgagcgggcagggcggttatcagagtgacgagtttgcccgcctgctcagtgcgcccaacctgttctgggccattggcccgtcgctggtggggacactatttgatggcggcgcgcgtcaggcccaggtggatatcgccaaggccgccaccgatgaagcggcggcgaaataccgtggtgtggtgttaggggcttttgagcaggttgaagataacctgtcgcagatcgccggtctgggcagcgcgctggatgaccagcgcgatgctgcgacagccgcgcaatacgccgaagacctctcaacctcgcgttatcgccagggcgccgtggcgtacctggacgtggtgaccgcccaagtggcggcgctggaagccaagcgcacggtattgcaactgcaaacccagcaattgagcgctaatgtgggcctgatcaaggcgctgggcggcggatggaacgtggctcaactggctgcgtcgaacactactcaaaccaaggagcagtaaattcatgactgactatgtacccccgaaggtgtggacctgggaaaccgaaagcggcggcaccttcgccagcatcaaccggcccattgccggagcgacccatgacaaggaactgccggtgggcaagcatcccttgcagctgtattccctggcgacgccgaatgggcagaaggtcaccatcctgctcgaagagttgttggccctggggcactcgggtgcggaatacgatgcgtggctgatcaagattggcgacggtgaccagttcggcagcgggtttgtgtcggtgaatccgaactcaaaaattcctgcgttgctggaccgcagtggcgccacgccgatccgggtgttcgaatcgggcgcgattttgcagtacctcgcagaaaagttcggcgcgttctttcccgccgagcctgcggcgcgtgcggaatgcttatcttggctgttctggcagatgggcagtgcgccgtatctgggtggcggctttgggcatttttatgcgtatgcgccaagcaagatggagtacgcgatcaaccggtttgccatggaaaccaagcgccagctggacgtgctggatcagcgtttggccgtgagcgagtacatcgccggggatgagtatacgatcgctgatattgcgatttggccttggtatggtgggctggttaagggccggttgtatggggcggctgagtttctgtcggtgcacgagtacaagcatgtgttgcgttgggctgatgcgattgaggcacggcccgcggtgcagcgggggcgcagggtgaatcgggtttccggggaggtttcggagcagttggctgagcggcatgatgctcgggatttgggctgagtacatatccgttgctgcggtgatggcttagatgggttccgcccttacggcgggtcactttggaaaagagccccaaagtaaccaaagggctcttgccccaccactcggcacctcgcttaggctcggtgtgcccgcccgcaggcttgaatccgtgggccgccgccatgggccatccctggcccatcgcggctaacccggcgtcctgccgggttacccacggattcaagcctgcgtgcggccagcgtggtttaacggggtgcccaagatcaaaagcaagagcacggcggcctgacagccggcctgagtggttggatcaaaagcgctgtttttgccagggcagaccgcgttcccccagacaaaatggagatccaattgtgggagcgggcttgcccgcgaatgcgttgcatcagccaccgaatcatcaactgacccatcgcattcgcgagcaagcccgctcccacagttttgactgagtaagacttcaatatctgcacagatctgcttctctgtgggagctggcttgtcggatcgccgcaccgctgcgatggcatcagttgggtgtaactgaaagaccgaggtgcctgtatcgcaggcaagccagctcccacactgaaccacttttgctccacaccactcaggccggctatcaggccgccgtgcttttgcttttgatcttgatctgaggcgccccgttaaaacacgctggccggaattcgacagggattggaaggtaaaccggcaggacgccggtttagccgcgacgcgccatggatggcgcgtggcggcggccccccaaattcctgtcggattacgggcacaccgagcgtgagcgaggtgccgagtgttggggcaagagcgtttggttactttgcgcttttcaaagtgacccgccgtaagggcggaacccatatccgccatcaccccaacaacggatatgtacccacccccacaacctagccaaaatccgtcccccgcgaaacaccctcccaggcagcaatctccgcctgcagcgcactcagctttgcactcacgtgatccaccgcatcattgcccaacaacaaatgcgccggcggctcagggctggccaccacctgcatcatcgccagtgccgctttggccgggtcgccgtcctggcgcccgctacgcgcctggcgcgcagcgcgcacggcatcgaacgaagcgtcatagtcggcaatcttgcgctcagcccgcaccatcgaacgtccggcccagtcggtacgaaagcccccaggttcaatggcggtcacgtgaataccgaatggcttcacctctttgcccaatgcctcggaaatcccctccagcgcaaacttgctgccgtggtacacaccaagccccgcaaaggtggtcaggccgcccatggacgtgatgttgagaatatgcccgcgccgccgtttgcgcatgaacggcagcactgcctgtatcatcgccaccgcgccaaacacattcacctcgaattgctggcgtacgtcatccagcgcagactcctcgagcacgccttcaaaaccataaccggcgttgttcaccaacacgtcaatcgtgccgatatttttttcgatttcggcaacaacggcgggcacgaacaggctgtcggtgacgtccagcaagcgcgcaaaggaatagccgggtttgaggttatcgaacgcatcgatggcctcgggcgtgcgcacggtgccgacgacgcgctcgccggcggccagcagcgcctcggcgagggctttgccgaagccggagctgatacccgtgataagccaggttttctgcgattgtgcgggcatggtgatctcctgtgagtgtgctgggatctttcgctttaaaccccaggcgcacaatcgggcagggcctgttcaggccttgaaggcgcgcttcacaatcgtcagtcgccgaggttttccgaggtcacgatctgcggcgcaatgtgcacccggtgctgccgcggatcgaacgcctcggcggtctgcaacgccaccagcagttgcaccagcgccgtggccgtctggcgcggctgtgagtccatcaccacatcgatcagcccgtggcgcaacgcctggcgcgacagctcggtggactcctgcaaaatgcaacacagcgccgggcgtttgggcaactgcgccagggcgctgatgatgccgtcaccaccaccgccgaccacgcagaggccgcgcaggtcgctgtggcggctgatcaggtccagggtcgcttcttcggtgatgtcgctgttgtccaggttgatcaacggctccagcggcttgagcccgggggcgtgttcggcgaggtagctgtgcaaaccttcaacccgtgcctgatggcctagaaaacgatggccgcccaacagaatccccacactgcctttgcgcgcgccgcaggttcgtgcgagcagccagcccatggtgcgcccgaccacgtggttgtcctggcccacatagggttcggccgcttgctcgtggatgtccgaaagcagcgccaccaccggcacaccggctgtgcggatctgcgctagacaggcgttgatcagcgggtgggcaaagctgacgaccgcgagggcatcgcactgcacggccaattgttcgatttgcccgacgatggcagcgggcgtgcggtcgatgatgtagtcgaactggcaggtcaggttggccgtggcgtggtggtaggcggcgtcgctgatcgcctcggccaggttggcgtaaaacgcctgggccgtgcccagtagcaggatgccaaagcgatacgtcgggcggcgttcgcgaatgcgttggccaatcagccgtgcggcgaaataacccacggcttcggcggcctggaacacctgctcggcggtgtccggattgaccggcgcgcgggcgttcaatacccggtcgacggtggccacgctcaggcccgcgtgggcggcgacagtggcaatggttgggcgtttattgttgttcatgacaggccccctgagcgccttgatagaaaactatcaagctgcgccgaggcctgatgatagcttgatagggaatggattcaaggccttgaggggcaataaaccgttctctatcgtctgtttcgcaaagcacttgaaacccacgcttgcggagaacaataacaatgcctgaacacaccgcccgtaccgctcggcgcgactatagcctcactggccccgaagctgcccgtgcggcagaaaaaggtctggtctcagcgagttggtaccagtcgcccatttcccgtaaacgcatgaaagaactgatgcagcgccgcgacggcccggtcttgcgcgacaccgcgatctgggtgagcgcattgcttgtcacaggcgccggtggctgcctgttttgggggacctgggcctgtgtgccgttcttcctggcctatggcgtgctctacggcaccgcgtccaacccgcgctggcacgaaaccggccacggcaccgcgttcaaaacccgctggatgaacgatgggctgtaccaggttgcgagcttcatgtgcattttcgaacctcatgtatggcgctggagccatgcccgccatcacaccgataccattgtggtgggccgcgacccggagatcgtcgagccgcgcccgccgagctttttgatgatgttgttgagcctgttcaacctgccgctggcctggaaaaccttcagcggcgtggcgcggcatgtcgtcggccggatgagtgcccaggagcaggacttcattcccgagtccgagtggccgaaggtgtttcgtgcggcgcggatctgggtcggcatttacgcggccgtgctcggcaccgccctctacttgcacagctggctgccgctgatgctggtgggcctgccgagcctttacggcgcctggctcggctatgtgtttggcctgacccagcacgtgggcctggccgaggatgtgctcgaccaccgcagcaactgccgcacgatctacatgaaccgcgtgctgcgctttatctacatggacatgaactaccacctcgaacaccacatgtacccgatggtgccgtaccacgcgctggcacaactgcacgacgaaatccgcagcgactgcccgccgccctacgcgaatctgttggaggcctataaagagatcatccccacgatctggaagcagcgcagcgacccgacctatttcgtgcagcgcccttgtggtgagcgagcaagctcgctcagcacaacaagctcgctcgcccaccacaagaaattggagaaaacatcatgaacgatcaatggatcgacgtctgcgccgtgggtgaaatagacgaagaggacgtgatgcgctttgaccacgggccgcacacttacgcggtgtatcgctcggccgagaatgaatttttcgccacggcaggcctgtgcacccacgagaaaatccacttggcggacggcctggtgatggaccatgtgatcgaatgccccaagcacaacgggcgcttcgattaccgctccggcaaagccctcggcgcgccggtgtgcgtcaacctcaagacctttgcggtacgggtcgaagcggggcgggtgttgctcgccgtcacggcgcaatgatgaacgcaccgcttgtgatcgtcggcgccggccatgccggtggccgtgcggcgctgaccttgcgcgaagaagggtataccgggcgcctgatcctgatcggcgatgaaccgcacgcaccctacgagcggccgccgctgtcgaagggcgtgttgcagggctcggcggatctggccggttgcagcctgtgtgacggtgcccggctcgccgcgttgaacatcgagcatctggcgagcaaccccgtacgcctgctggaaccgcagcaccagcgcctgcaactggccgatggtcagtggttgccctacgccggactgttgttggctaccggaggccgggcgcggcacttgccgcccagtgaaggcaacgtgctgtacctgcgcacccacgatgaagcgctggcgctgcgcgccgccttgcgcccgggtacgcggctggtgattgtcggcggcggttttatcggcctggaagtggcggcgtcggcgcgcagcctcgggtgtgaagtgacggtactggaggccggcccgcggctggcggggcgcgtgctgccgcccgtcatcggcgaggcgctgttgaatatgcaccgatcgcagggcgtggacgtgcgcttgaacgtggtgctggaatccatcagccctgatgcggtgttgttggtcagcggggagcggctgccgtgcgacgtggtggtagcgggtatcggcatgcagcccaacctcgaactggccgcgcaggcagggctggaagtcgggcagggcatccgcgtggatgcgtgcttgcgcaccagtgcgccaaacatttatgcggcaggcgatgtgtgtgaattcagcctgaatggcctctaccaacgccaggaaacctggcgcaatgccgaagcccaggggcggcatgccgcgctgaatctgttggggcgtgagttgccgttcgaggcggttcaaggtttctggtccgatcagtacgactggggcttgcagacggtcggcgtgatgaccccgcgcacggtcagccgtccgctggcgggtggtggtgtgttgctgttctacctcgacgccgatcagcgtttgcaaggcgcctgcggctgggcgcccggcaacagcgtggccagggacatcaagctgtgcgagcgcctgataacggccgccacgcctttgagcgaagtcagcctggccgatcctgagcggtctctcaaacactggctgcgaggctgatatgcgccaatttctggtgttccaatccctgtgggcgatgcaaaccgaaccgggcccgcttgaagcgtggctggaccggatcgccgccgccgggttcgacggcgtcaccgaccattactggaaacctgccgatgtctcacgcctgcacgccgccgccacgaccaggggtttgcaggttgaaggccaactgttcccgcagacagtggatgacctggcggcggcgctggaggtgatcagccgctatggctgccaccacctcaccctgcaggccgacgtgcgccctcgcacccaggccgaggcggccaggctcatcgagggttggcagcgcctggccgagcaggtggacttcccggtgctactggaaacccatcgttaccgcctcaccaacgacctgttgttcaccctcgacctgctcgcgcaaatgcctgaccttaagctgctcgctgacttgtctcactatgtggtgggtcgcgagttgcccgagcctggcgctgttgaggatgacgcgcagatacacgaaatcctgcgccacagctgggggttccatggccgtgtggcgagcggcgagcaggtgcaggtttccctggatttcccccggcatcaggcgtgggtcgagcgtttcacgggctggtggcgctacggcatcgaacactggctggcgcgccctgatacaccccacagcctgtccttcacctgtgaactggggccgcccccttatgcaatcacgggcgccgatggccgtgaaatcagtgaccgctgggccgaggcgttgaagatgaaggcattgattcgcgacgtgtggcagagctgtcaaagatgatctgctaatctgcgcgggttcaattcgcccatcgcctgtggacccgctcatgaagacatgccccgttcaaccgcccctggaaccacaatccgtctgccacccgatcacccgcagtgcgattttcatggtcgccaccctggcccccggcgacctcgacggggtacgcggctggtgcgccgacattgccggcctggtgcgttcggtgggcaagcgcgtgccgtcgggcaacctcacgtgcgtctgcgggtttggctcggcggcgtgggaccgattgttcggcgcgccacgcccggcggcgctgcatccgtttcgtgagtttggcgtggaggggcgcaaggccgtctcaaccccgggcgacatcttgctgcacatccgtgccgaccagatggacctgtgctttgaactcgccacgcaactgatggcggccctgggtgacagcgttacggtggtggacgaggttcagggttttcgctacttcgatatgcgcagcatcatcggctttgtcgatggcaccgagaacccggtggggcgcaaggccgaggggttcacgattgtcggtgatgaagacagtgagtttcgtggcggcagctatgtgctggtgcagaaatacctgcacaacatgaccgcctggaacggcctgacggtagaagagcaggagaaggtgatcgggcgcaccaaactgtcggacattgaactggacgacgaaaccaaaccgagcaatgcccacagcgcactgaccgtgatcacggacgagcagggcgaagaagtgaaaatcctgcgcgacaacatgcccttcggccggcccggtgccggggagttcggcacctacttcatcggctatgcccgctcgccgcaacccttggagctgatgctggaaaacatgttcgtcggccgcccggtcggcaattacgaccgcttgctcgacttcagcaccgccgtgaccggcggcctgtttttcgtgccgtcggccgacttgctcgaagaactggccgagcgtacgccgggcctctaagaccctacagtccaactgtgggagctggcttgcctgcgatagcggtctgtcatccagccaatgtgtcgcctgacacgctgctatcgcgggcaagcccgctcccacctcggatgtgtggtggtttgcgagtgagtcagttcaatacgccggtgctgaccgccacaatcaaaaagatccccagcaacgcgcggtagatcacgaacggccaggtggagaagcgctccaggaatttcatcaggccccagatcgcaaagaatgccgagatactggccaccaccaaaccgaagatcaaatgcggccaggcgtgcgccggcatgtcggcgtgcagcagcacccacagctctttcaagcctgcgagggcgatggccggcaaacccagcaggaaggaaaagcgcgcggcttcttcacgcttgaagttcaggaacagcgcagccgtcagcgtggagcccgaacgcgatacgccgggaatcaacgcgccaatctgcgcaacgccgacgatcaaggcgtcgcgcaggcgcatttcgctgacttcacgggtgtgccgggcacgcacttcggccacggccagcaacaccgccatcaccacgcaggaaatgccgatcaccatcaggccacgcagcggcgagttgcaggcgttcagggttgacgacagcgccaggccggcgatgccaatcgggatggttgccagcacaatcgccaccgctagcttgaaccagcggtcgttgtagtcgccacggcgcacggcactgatgctgccggtggtgacctggcgtacatcgcgccagaaataactgaccaccgccgccaacgccgccagttgcatcgccgccgaaaacgccgagcccgggtcttgccagccgagcaaggcgggtaccacacgcatgtgggcggtggacgacaccggcagcaactcggtaatgccctggatcacgcccaggatgaaaatctgcaggtaatccagggaggcaaagcctacatccaggccggcggtacagacgttggtcaaaattcaggtccttgagaaaaagggtaggcgggcgaagtttattctaaatgtttcaggattttggcggggccaccataaatccgcaatcggttcagcaaacagaaaggttatgcaatgtattggcctgggcacgggttttgtgaacaatggcgccctgcgttttttgaccgagagccccatgcctgaaaccaccgtcgaactgatccagaccggccccgaagaagccgagctgatccgcaacctctaccagtactacgcctacgagtcctcggactgggagcaggaagatgtcgaagccgatggccgcttttacatccatgacgaacacctggcccgctactggcaagacccgcaatggagcgccaacttgctgttggtggacggctatatcgcaggcttcctgctgatcgaaggcagcgaattaccaggcttcgacgccctggaactggccgacctgtttatcctcaagcgctatcgccgcaaaggcatcggccgcgccatcgccacccaagtgttgtgcagcggcgaggcgaactggctggtgcgcttttttgatcaggatgaagtgtcccaggcgttctggcgcacggtgctggacaacctgccgcgcccggtgcagacccttgagctggaggatgacccgcagttggtcagttacctgattacgcgcgcggcgctgcattaaacacttgctgcatcgcctgtggtgcttgcccgaacgccctgagaaatgcctggcgcatgcgctcgcggtcgccgaagccggtttcgcgggccaccacttcaaccgggtggcggctggtttccatcagcgcgcgggctgcctccactcgcagtgattcgatggccttggccggggtttgcccggtttcttcgcgaaacacccggctgaactggcgcgggctgagccgcgccacatcggccagggcttccaccgacaggtcgtgggtgaggttctcacgggcgtaggccagggccagttgcacccggtccgacttgggatcgagttccagcagcgccgacaattgtgattgctcgctgcccctgcgctgggcgatcaccagcttgcgtgcgatgcgccgggcgaggtcgccgcccaggtcgttttccaccatggccagcgccaggtcgaccccggcgctcatgccggcacaggtccagatctggccgtcgaccacaaacagcttgtcttcttccaggtgaatgcccgggtaacgcttgcgaaacgccggggcgtgaatccagtgggtggtggtgcgcttgccttcgagcagcccggcttcagcgagtacgaaaatgcccatgcacagcgaggccacccggcgcgattgggcagcggcggccttgaccagctccagcaggctggcctctggcaggcgaaaatccatatagccgctgacaatcaaggtgtcgtaaccctgcggccgaatggccgtggtgttcaccgagaaaccctgtgacgtcatcaccgcgccgccctcctgcgacaccaggtgaaactcataggccggctcgccccgcagcaggttcgcgcattcgaacaccgaccctgtgctgaggctcaggcattcgaagttcgggtaaaccagcagcgcaacgctgtgcattgtcattctccaggggcgttcggtgaggcgattgtcggcgtgtgccgggtaaacggcaaccgccagcgtgccgtgtccggaatccttgcggatatgacattgttgcggtttgcccccacgcctaacattccctcaacgaactagacgactggtctaatcgagcgggatgaacgatgaataacgccacccacagtacaaagcagaccctcttggacgcggcgcaatcgattgtcggccgtaaaggtttttctgcggtgggcttgaacgaaatactgcaagccgccgaggtgcccaaggggtcgttttatcactacttcacctccaaagatgcgttcggtgtggtgttgctcgaccactacttcgacagctacgtgcacggcatgcagcaactgttcagccaaccgggtttaaccggctacgccaagttgatgcgttattgggactgctggatcgacaaccagaccggctgcacccatgcaggcaaatgccttgccgtcaaactcggtgccgaggtgtcagacctttcagagcccatgcgtttggccctgcaacgtggcaccgcgcgcaccattgcgttactcgccgaggccctcgaacaggccattgcagacggctcggtcgagaccgcacaacccgcgcagggtctggctcaacgcctgtatgcgttgtggctgggcaccagcgtgatgaacaaaatcacccgtacaaccgcgccgtttgaccaggcgctgctgctgacccgacagctgttgggccgccctgaacccactgacatccacatcgatcgaggcaccggaaaatgaaagtattaatggtactgacttctcacgacacgcttggcgacaccggccgcaagaccggtttctggctcgaagagttcgccgcgccttattacgcgttcaaggacgccggtgccgatatcgtgctggcatgcccggcgggcggccagccgccgctggacccggtcagcggcttgccggatttccagaccgaacagactcatcgcttcgctgccgacccggctgctcagcaggcgttggccactacggtaaaactggcgtccgtcaacgccgctgacttcgatacggtgttctacccgggcggtcacggcccgctgtgggacctggccgagtcggcgacctccatcgccctgatcgaagccttcgaacgcgccggcaagcccatcggttttgtctgccacgcaccgggcgcgctgcgtcacgtcaaggcagtcaacggtgagccgttgatcaagggccgccgcgtgaccgggttctccaactcggaagaggctgcggtggaattgaccgacgtggtgccgttcctgattgaagatgagttcaaaaagctcggcggccagtatgagaagggcgccgattggcagtcgttcgtgattgaagatggtttgctggtcaccgggcagaaccctgccagttccagcgacgtcgccaaagccctgctgaaactcaccgcataaatcactaaacccgttcactcattggcggctcttatgagccgctgatgctttggctcgccctgaatttggacaaccccacatggctgacagcattttaagtaccccgctaacactggggcatcacacactgaaaaaccgtgtcgtcctgccgcccttgacccgtcaacgcggtgcgcagcccggtgatattgccagcggcttgatggccgactattaccgccagcgcgcgggcgccggtttcatgatcagcgaaggcacacagatcgagccccgtggccagggctatgcctggacgccggggatctacagccccgcgcagatcgacggctggcgcaccgtcaccgacgcggtgcatgccgagggcggggtaatctttgcccagctgtggcatgtggggcgcgtatctcaccacgacctgcagcccgacggtggcgcgccggttgcgccgtctgcgatccagccgacacaagtcaaagccttcatcgaaaccgcgccgggtgccggggagctggtgcaaccgcccgtgcctcgggcgttgagcactgccgaggtcaaggcgctggtcgggcactacgtccaggccgcgcgcaacgcgctggatgccggcttcgacggggtggaaattcactcggcaaatggctacctggtcaaccaattcatctcggcccatgccaatcagcgcgacgacgaatacggcggctcgctgcataaccgtctgcgtttcctgcgcgaaatcgtcgaggccgtgagtgccgtggtcgggcctgaacgcctgggtgtgcgtttttcgccgttgttcagtggcaccgaccaggaccgcgtgtacattggtttggtggaagaagacccccacaccacctacctcgaggcgatcaaggtgctgcaagcagctggcattgcgtacgtttccatcgccgaagccgactgggacaatgccccggaactgccggaaaccttccgccgggcggtacgcgatacgttcagtgggcgcatcctctacgccggccgttacaccgctgaacgcggtgcacaattgctggaagccgggttggcggacctgatcgggttcgggcggcccttcattgccaacccggacctgccgcaacggctgttcaacggctggccgttgaacccgctgcgggccgaggggatgtacggtggcggtgaggcggggtatatcgactacccgacctacaccgaataagaagccacctctgtggcgagggagcttgctcccgctggagggcgaagccctcccaatttttagctggcagcgtgcagccgtgacgaaaaaggggctgcttcgcaccccagcgggagcaagctccctcgccacagggcagcctgtttttcttcaggctacgcgcaacacaatcttgccaatgtgatccccgccttccatccgcgcatgggcctggtcggccgccgtgtaatcaaacacctggtcgatcatgggcaggcaacgccccgccgacagcaccggccacacgtgctcgcgcagttgctcggcaatggcggctttctcatccttggtgcgcgcacgcagcaacgagccagtgacgatggcgcgtttgccgaggatggtcagcaagtcaacgtcattggccctggcgccgccgaggaagcccagcatcacaatgcgcccgtccatggccaacgccttgaggttgttgttgaggtaggagccgcccatgatatcgaggatcacatccacgccctggccggcggttttttcggcgatgacatcagcgaaatcctgctcgcggtagttgatcgcttcggcaccgagggcgcggatggcggcgcatttttcttcgctgccggcggtggcgaacgcctcgatgccgaactctcggcacagcatcaacgcggtggtgccgatgccgctggtgccgccgtggatcagcacgcgctggcccttgtgtgcgccgccgatgccgaacaggttggcccacacggtgaagaaggtttccggaatcgccgccgcttgaatccattccatgccatggggtaccggcaatgcctgactggcgggcacagcacaatactgcgcgtagccgccgccattggtcagggcgcagaccttgtcgcccaggcgatattcagtcacgccgtctcccagtgccaccacttcaccggccacttccagcccgggaatcgggctcatgccgggtttcatcgggtacttgccggcgcgttgcagcgcgtcggggcggttgaccccggcggcgtgtacctgaatcagaatctcgccggcggccggggagggcaccggttcctgacgtggtttcaacacctcggggccgccgggggtggtgatttcaatcagggtcatttgctggggaagggacatttgagcgttcctgtcgcgatgggcgtatgagttgggaccgcgacgcgtcgccggcggttctgagtatttttctgtggcgcccagcatacccacaagcgttgatgcaataatgctgcgattacacggcattacgatgcaaatatgcatcaggaggggcggtaatgaattgggacgatgctcgcgtgtttctggcggtgtgccgcgagaccacctctcgcggcgcggcacgcgtgctgggagtggaccaggccaccgtgggtcggcgaatcaacgcgctggaaaaatccttgaacgcaaccttgtttttgcgcacctccgaaggctacgtgctgacggctgtcggtgaagccgccttgctttcggtggagaaaatggagcactcggccctggacctggagcggcagatccagggcctggatgatcgcctgaccggcacggtgcgggtcagtaccaccgactccatggccatcgacttcctgatcccggccatcgccagcctgcacgccaaacacccggacgtgcgcgtgcaactggacgcttccacgcagctcatcagcctggccaagcgcgaagccgatattgccgtgcgcaactcccgcccggacaaccccgacctgatcgcccggcgtatcgcccgctggccggtaggcctgtttgcgtcacagggttatatcgaccgccacggcgtaccggagcccggcagcctgtttgcaggccatgacctggtggtctatcaaccgcatttgcagcaccagaaagacatgaccctggtctgcgaacccttgggccacgggcgcattgtggcggcgctgagctccagcctgctggtacgccgttccatcgccgcgggcctgggtattggcgagattcccgtgcacagcggcgagcgtgacgggctggtgcggctgtggccggaacgcacccggccgttgccttatgacgtgtggctggtgacccatgccgatttgcgccacaccgcccgggttcgggtggtgattgatgaaatcgtcgcggcgtttgccggcacgggcgattgaaccctggcggttcaggaaggccagcaggtctcaggcgcgggatttttttggttggagtacatatccgttgctgcggtaacggccacctagggttccgctcttacagcgggtcacttttggaagagcgccaaaagtaaccaaaaagtcctcgccccaccactcggcacctcgctcacgctcggcgtgcggccagcgtggtttaacggggcgcctgagatcaagatcaaaagcaaaagcacggcggcctgacagccggcctgagtggttggagcaaaagcgcagcgagcaccgtttagctgatgtaatgagcttcaaatgtgggagctggcttgcctgcgatgcaggcacctcggtacacctgatgcgccgagtcgctgccttgcgcatcactcaagccgacaagtgctcatacaaaatcgtcgtacccaccagcatcagcacgacgccgccgaccatttcggcgcgcttgcccaccaccgtgcccagcacctgcccgagcatcatgccgagggtcaccatggtcatggtcgccaggccaatcgccgccgaggctacgagaatgttcacatcgacaaacgccaggcccacgcccaccgccagtgcgtcaatgctggtagcaaacgccgtgacggccaggatcatgaaggagtgctgggtgggtttttcggcctcttcttcatcggccttgagaccgttgtagatcatgtgcaaacccagcgcgacgagcagggtaaaggcaatccagtggtcccagtgttccacccagcgtgtggctgcatggccgatggcccagccgatcatgggggtaatcgcttcgatcacaccaaagatcaaaccggcgcgcagggcttcggtcaggcggggtttgtgcaggctggagcctttgccgatggccgccgcgaaggcgtcggtggacatggcgagtgcgaggagaatcagggaaatggggttcacggcgcggcttccagtcgggctgtatgagtcaacgacacagccacgtgcccgactacaggcgtggatgtgtcgctggtctcaccaaccacaacggtgttcgtaccacggcaggttgccgaatatgttgatacgaacgcttccgagcaggtcagaagccggttactccccaacgaagggccggatcataaacgggcagacatgaaaaaactgtcaacgcgttttaaaccaccatgatgatcttcgacaccagctccaccaccgtcttggcctgcagttttttcatcagccgcgcccggtgcacttccaccgtgcggtgggaaatggccaggcgcagggcgatttccttggacttcaaaccgttgacgatgtgcatggcaatttcccgctcccgtggcgtcagatcgcccgtgccctggtgcctacggtccaggcgttcgaagtgccacaccatcagctcaaacgggtttctcggggtgagcgtatagccgtgggatttggcccagaacacttcgccgtttttgtgctgcatgaagcgttcgtcggaatagaagccgttctggctgtcgagtaaccagtcatggctgcgcttgccgatggcgtggtagtcggcctgggacgggtagatcagcagggtcaactggtccagtaacgcttcgcgcgggtaaccgaacagctgcaggaaggcttcattgcagtcgacgatcacacggtgacgcgtgaccagctgaggggccggggagtgttggaaggccaggcgctgaatatcctggaagggctgtgctaatgcgttcattgggcatcctgcctcgtcttgtttcgcgccgggtggctacttattcatgtaagtagttacacgaattggcgagcggccaagggtgggtcattgtaaggaatgtccgcaccaagaacagaagaaattacctatgcctgctgattgcgtttccatagttgctgccggtcattcgaagtttggtcgcctggaaggcaccacccttgaagacttgatcgtgcaggtcacccgcgaagccctgacggacgcggccattgatgcgtcgcaaattgacgcgctgtttctcggccacttcaattcggggctggtgcccgacgggtttgctgcctccttgctgatgcaggccgacccggggctgcgtttcaaacctgcgacccgctgtgaaaacgcctgtgcgtcaggctcggcggcgattcaggccggggtcaacgccatcctgtccggcagcgccgagctggtgctggtggtaggcgctgaaaagatgacccacacctcaaccgccgaggtcacccgggccctggccggcgccggctaccagaatgacccggccgaatccggcctgagctttccccaattgttcggccgtgcagcgcggcaatacgccgagcgctaccactgcccgctgggttcgatggcggccatcgccagcaagaaccactccaacgccatggccaacccgttggcgcagatgcaccgggtgatggatttcgagcattgcaacaacgtgtcccccagcaacccgtttgtggccgagtccctgcgcctgacggattgctcgctgatcagcgacggcgccgcggccatcattctcgcttcgcccaaacgtgcgcggacgtttcggcgggaggtgcagatccgtgcgatgacccaggtcaatgacctgctgcccattgccgggcgcgacatcctcgccttcgaaggcccgcaacgtgcaatccatacggcattgcgcgcggcgaatatcaccttgaatgacttgagcttcgccgaggtacacgactgcttcaccatcgctgaactgctgatctacgaagccatgggcctggcgccgaaaggcgagggccaccgtgtactcgacagcggtgtggtgcgcgcgggcgggcgtttgccggtgaacctctccggcgggctcaaggccaaagggcatccggtgggcgcgacgggcgtgtcgatgcacgcgcttgcgttccgccaattgaccggtgagcccattggcctggcggcgccgaaccctgagttcggcctagtgttcaacatgggcggcatggcggtggccaactatgcctcggtcctgcacgcgcggcggagctgagccatgaacatcgccaactggctgcatgacaccgcgcgccgcgccccgcaacgcccggcgctgttcgacggcacccggcaagtggccgactacgccaccttcgccgcccacgcccgccagcgcgcggcctgcctggtcgacctgcacgccattgtggcgggtgatgcggtcgcggtgctgatgaagaacagctgcgactacctggaagtgctctacgccatttggtgggtcggcgcggtggcggtgccgatcaacgccaaactgcatccggcggaagccgtgtggatcgccgataacgctgaggcgaagttgatagtgaccgacggcggacgggtgttttcgtcgcgtgaattaccccaacgctgcaaggagctggacggccacacactgccgcccacccgtggctggccgaccctcgaacagcccgtgccgcgccaggacagcgacctcgcctggctgttctacacctccggcaccaccgggcgctccaagggcgtgatgttgtcccacggtaacctgattgctatgtcgctgtgttacgccaccgatgtcgacacggtcagccgcgacgacgcggcggtgtatgccgcgccgatgtcccacggcgccgggctctacaacttcattcacgtgcgctgcggcgcgcggcatgtggtgccggcgtcccgggggttcgacgctgccgaactgttcgggctggcggcgcaaatgggcagggcttcgctgttcgccgcaccgaccatggtcaagcgcatggtcgaacaggcgcggcgccagggttacagcggcgagggtatcaaaaccatcgtctacggcggcggcccgatgtacctggcggacctgcgcgaggcagtcgacaccttcggcccgcgcctggtgcagatctacggccagggcgaaagcccgatgaccatcagcgtgttgccccgcgcgctgattgccgaccgcgcacgggccgactggccaaccctcgcagcctccgtgggccatgcgcaatcctgcgtggaaatccgcattctcgatacacagcaccagccggtgcctgcgggccagcgcggcgaaatcgccgtgcgtggcgcaacggtcatgcaaggttactggcgcaaccccgaagccacccggcaggcgttggtcgatggctggttgctgaccggcgatatcggttttcttgacccggccggttacctgacccttaccgaccgctccaaggacgtgatcatcaccggcggcagtaacgtgtacccccgtgaagtcgaggaggtgctggcccagcatcccaacgtgtttgaagtctgtgtggtgggcgaggtggatgagcaatggggcgagtcggtggtggccttcgtcgtcacgcgcgacgggcagttgctcgacgatgccgaactcaccacctggtttctcgcgcgcatggcctcgttcaagaagccgaagaagtatgtgttccgcgacgaactgccgaagaacagctacggcaagatcctcaagaccgacttgcggcagcggttgaaagaggcgagtatcgccgccgttcgctgaacccgctattccatggattgatagacgacaaggagtcccttcgatgggcattcacgcgcaagacacggtccgcaagcggcgccgtgcgtttctcggtgccacctccggccacttgatcgagtggtacgactacggcgtctacggctttctcgccgtgtacatcggccaggcgtttttcgtctccgacgaccccaccaccagcctgctggccagcttcgccgcctttgccctgagctttttcatccggccattgggcgggctgttcttcggcccgttggcggacaagatcggccggcgcaaaaccctgatcatggcgctggtgatgatgaccggttccactgtgctgctcggcttgttgccgacttacgccacgctgggcatcgccgcacccatcctgttgattctggtgcgatgcgtgcagggcttctcggcaggcggcgaaatcggcacggtcaccagctttatctccgaatacgccggccctggccgccggggttttgccacgtgctggctgatggtcaccgcggtgctcggcctgctgctgggcggcgccgtggccaacggcatgacctgggtgctgggcgccgatgtgatgcaggaatgggcgtggcgcgtgccatttctgatcgctgcaccgctgggctttatctccatgtacatccgcctgaagcttgaagacagcccggagtttctcgccctgcaacgggccgggcaaacctctcgcgcaccgctgcgcgaagtctggcagtggaagcgtgcgatagccctggtgttttttatcatcaccttgcacagctcgatcttttacctggtgctgaccttcgcctcgacctacatggccaagatcctcaagttcgacagcggcaccaccttgctctacgtgttcgtcgccagtttttcggcggctttcgtgatgccgtttggcggcgcgttcaccgacaaatatgggcgtaaacccttcctgatggtgatcggcaccctggccacgctggcgatgttctggctgttcaagatggcgccgaccgccacccccgcgaccttctctgcgccgttgatggccgtggcgatcctgttcgggctgtatgcttcgtcgacctatgcgctgatgagcgaactgctgcccacgcgcatccgctccaccgggattgccgtggcgtataacgtgccggtcgcggtgtttggcggcagtgcgccgctgatctccacctggctgatcaaggtaaccggcgacatcacctcgccgtggtatttctacgtggccacgggcgtggtctcgctgattgccctggtgctgctgcgcaaggaagacttcgtggccagtggcaagccggcagtggtacccgctggcgcagcattggcctgacggctcaggggcgctggggcgtgaccgacgtcccgaaggtattgcccatgcgaatgctggtcgccgccggggtggccagcccggcctggttcggcgggcgtttgtgcaccggcacggtcaaggcttcgcggtttttctgcgcggccttggcagcgttcgggtcagtgctcatctgctggctcaggcagccgtagtccggcgccttgtacccatccaccgtcacttccgtgcagcctttggcagcggtttcggcgtgggcgctcaacggcagggcagcgcacagcaacaggctggcgagggtcggaaagtgcttcatcggggcctcctggcgggcccgcggtgaggggccgtcaatgccgcaaagtgtagtgcagcgggcgtcttgtcaccgtgatgttttttttgccatcaccgtaacatcaggttcataaactggcctcaggatgacggttttcaaggacacgtcagccgtgcagcgatgcaacgcggggggtgagcaggggggctggaggcgtgccgttggcgccctggtcttgctgttgctgcttgtcgctgcgacgccgacgagggcagagccgccgctgttgatactggacctgcccgcgcaagacctggaacacgccctgcaagcgtacagccatgccaccgggatggcggtgctggtggaccgcgagttgacgcggggccggcgctccctggctgtgcacgggcgtttcacggcgcaagaagcactggcgatgctgctgacggggagtggtctgatggcgcgatatgcacgcgaggatgccttcaccttgcaactgcccgaggtcagccaggcggcttcaccgcgcaacgcatcacgggtcaaccacagctacgccgccgcgttgcagcaggcaatcgaggccagcttgtgccgttcaccgctgacccgccccggtagtttccgggcgctggtgcaggtgtgggtcaacccgcaaggggggatcgaacacagccggctggtcagctcgaccggtgatgaggtccgtgatgaagccgtgttgcttggcctgggcgcggcccgggtggaacgcccgccgccgagttcgctgcgccagccggtgaccttacttttgatgcccgacacaacaggaaaacgcatggaatgcacggcagggacaggagccacgggcggatgaaaaacaccgggcacagtacgatggtcagcgtgtttttggcgtcttacgaggacttcaaagtccgtttgcgcaagcgcctgggctccgaggacctggccaacgacgtgctgcacgaaacctacctgcgggtcgaccgcatggacgtgccgccgaacctgcagcaacccaatgcctacctctaccgcatggccttgaacatcgccgccgaccgccgccaggccgacgcgcgcctgctcaccggcagcgaggtcgaagagctgctgcaaaccgctgacgaagcccaggacccctcgcgggtggtgggcggccagcgtgagattcagtcgttggtcaaagccctctacgaattgccggcacggcgtcgcaagatcctgattgctgcgcggctggaggaggcgccgcatctggaaatttcccagcggtttggcatttccacgcgcatggtcgagaaggaaatcaaggccgcgctggggcactgcgccaaacgcctggaaagaaaagtgattcagcggttcggtcccggggccggaaaaccgtcttagtgttgagtccctgaaaaaaccgcgagtacctgcacgcttgaacatcttcaatttccccgccgcacggccgatgcccgccgacccgctgcacgatgaagcccgcgactggctgctgctgctgacctcgggccgtgccaccgtggccgacgccaaagcgttgcgcgcctggtgtgcccgcagccccgagcacgcccaggcgtttgagcaggtcaaggcgttgtggcagcaattggccccggccgccgaacacctcgcgcaaccgcgccatttcggccgtcgcgcgtttctgggcggggcaattgcggcgtcggcggcggtggtgatggtccacgttggcctgccgggtgggtttgccgggttgacggcggattaccgcactgaagtcggcgagcagcgccaggtggtgttgagcgagggtgtgagcctggaactcaacacccagacgcgcatcagccgggtcgggcagggcattgaattgctggagggcgaagtcgaagtgcttgcccacggcgcgcagccgctcaaggtgcaggccggaaccggttgggtcagtgcggcacgggcacggttcaacgtgcgtaacaccgaccacaaggtctgcgtgacctgcatcgacggtgcgctgtcggtggacgtcgccgggcgcagcgtgcagttgcaacagggccggcaactgacctatgacgccgccgggttgggcgaggtggccactgtcgatgcccaggccgtggtggcctggcgcgaacaggtgctggtcttcaacaacgccacgctggcgacggtggtggatgaaatcaaccgttaccgcccgggcatgctggtgttgctgaacaaggagctggggcagcgccgcgtgcaggcgcgtttcagtttgcagcaactggctggcgtggcgctgttgattcgcgacgcctacggggccaagtgcaccgagttgccgggcggggtcgtgttgctgagctgattcaacacgccccggcccgcgccattaagcgaccttttctgcggcctggcgctcacgttcggcgactaactcccgcgtcagtggaatcaggcgtttgccgtagtcgatcgcgtcattgagcgggtcgaagccgcgaatcagaaaagtggtaatgcccaggtcgtaatagtccagcagcgcttcggcgacctgctcggcggtgccgaccagagacgtggagttgccctgggcaccgagcagcccggcgatgccggtccacaaacgtttatccagccgagaaccttgggcggcagcggcgagtaaacggcgcgagccttcattcggcggttcacgccgcacaaagccgtttttctcggccaaggcggtggcctgctgcaagatgctgtcggcacgcgcccaggccagctcctcggtctcggccaggatcggtcgcagcgacaaactgaagcgaatcgtacgcccgtgcttggccgcttcggcgcgcacctgggtcacggtttcgcgcacttgttcataggtttcgccccacagtgcgtacacgtcggcatgcttgccggccaccgcaatcgccgccgccgacgagccaccgaaatacagcgggatatgcggttgctgcggcgacttcacggccgaatgcgcaccttcaacctggtagtacttgcccgcgaaatcgaagggcttttcactggtccattcctgacgcaccacgctcaggtattcgtcggtgcgtgcgtagcgttcatccttgtcgatatggctgccatcggcgcgcagctcacggtcgtcaccgccggtgatgatgtgcacggcggtacggccaccgttgaacacgtccagcgtattgaattgccgtgcggcgagggtcggctgggcaaagcctgggcgatgggcgatcagaaattgcagcttttgggtcacgctggcggcgtgggcggcaatcagcgtgctgtccgggctgttggagtgaaaggcgatcagcgcgcggtcgaaaccggcttcttcatgggcgcgggccacggtttccacatactcgggttgcagcaccgggccgctgcgcggatgaatttcggaggagtgatggccgccgatgtagccgatgaattcaatgctcatggtcagttccttgatcaggtggtaatcagcacctccaccgggcaaggggtcggccattgaggttaaaagtagggccagcggcacgcgttgtaaaaggctgattggttctaacctaattattaaaataaagaatcattgatttaattaaatatcagtaatgcgcattttaatttcatcaggtcatgctttccgaggcttttacagcggttttcatgcgatgagtgcgttcgccatgccttagtccatggcaatgccgggttgcccggccgtgctgttgacgccggcgcggtcggccaggtatcgcgccggcggctggccaacggccttgcggaacatggtgataaagccgctggcgttctcataaccgaggtccagtgccacacgctgcacactttcccccttggccaggcgttgcagtgacaggatcacatgcaactgccggcgccaacgcccgaaactcaagcccaactcttccagcagcaagcgggtcatgctgcgctcgctcatgccgatgcgtatggcccattggctgagggtggatttgtcgcccgggtcggcgagcaggctgtcggccaggcggcgcagccttgcgtcctggggcatgggcaggtgcaggtcttcgatgggggcttcggccagttcatccaatagcgtgttgatcaggcggccctgggcgccttcctcgtcatacagttgcgggaaactcacggccttggtgatcaactcgtgcaacaaacctgaaacgccgagggtgcagcattgctggggcagagcgtgcaaggcgtcggggtcaaccagcaggcaatacacgtgcgcctcgccggagccgcgcgccgcatgggacatgccgccgggaatccacagcgcgcactgtggcggcacaatccagatacccgcttcaatttcacagtgaatgaccccgcgcaaggtgtacatcaactgcgccttgcgatgggaatgctgctcatgctcccagctctcggcggtgctggtcgcgcccacggccaccacggcgcgcgggatcaggtcggcgtctttggacatttgcgggtcgcgcaggtcgaggcggtggcgtttcatgctggtttggcactttggctgaattgcgaaacatactggctattttgtgcaatgccgtccagtggcgtgaccactatagtgagatccactctcattcaggagctttgccatgcgactcgacagttcaacttttcccgtggtgaaaatcgtcttcgacgcccccaacgaaagtggcccggacgatgccttccgggttttcgaaaacctgctggcgcgccaacagcccttcatgctgctgcacgaaaaggcggtggacgagagcaatcacgaacactcccacgaagagcgcaaacaggcctcgatctggatgaagaaaaacaaacaggcgctgcgtgcgttcgtcaaaggcatgatccaggtggaacccagtgcggccaaacgcctggcgctcaaaccctttgccgccaccttcggcaaggcctggggctacccgctgctggtggtcgaatccaaagaccgcgcttgggcgctggcgaaggatgtgctggatgagcaggtgtcggatgtggcgtatttctaagctgaatttccggcaccgcaattccctgtgtggctcagcctccaggcaacaccgccaaacccctgtgggagctgtcgagccccggcgaggctgcgaaggggccggtattgctggcatcttcatcgtctgagccaccgctttcgcagcctcgctaaagctcgacagctcccacagttgaccgaggtgtttcaggaccaatttctgcctgcccggtggctttaaggtatcctccgcgccccgcttatcaccgattcaaagacagatgacaggacaagacatgcaggcgctgctggagtcgattctcgacgaagtgcgcccactgatcggcctcggcaaagttgccgactacatccccgcgctggctgacgtgcctgccaatcagcttggtatcgccgtgtacggcaacgacggcgcggcctactgcgcgggcgacgctgacacgctgttctcggtgcagagcatttccaaagtgttcagcctggtgcaggccatcgaccacggcggcgaaaccatctgggagcgcctgggccacgagccttcggggcagccgttcaactccatggtgcagctggaattcgaacgcggccgcccgcgcaacccgttcatcaatgcgggtgcgctggtgatctgcgacatcaaccagtcacgctttgccgtgccgattctgtcgatgcgtgacttcgtgcggcgtctttcgggcaacccgcagattctggtcaacagcatcgtcgccgagtccgaagcgcagcacggcgcgcgcaacgcggccatggcgtatttgatgaaatccttcggcaacttccacaatgacgtggacgccgtactgcacagctactttaattattgcgcgctgcagatgagctgcctggacctggcccgcgctttcagcttcctggccaacgaaggcgtgagcgcccacagcggcgagcagatcctcaccccgcgccagaccaagcaagtcaactcgatcatggccaccagcgggttgtatgacgaagcgggcaattttgcctaccgcgtgggcttgccgggcaagagcggggtcggcggcgggatcgtcgccgtggtgccggggcaatttacggtgtgcgtctggtcgccggagttgaatgcggcagggaactcgctggcggggatgaaggcgctggagttgttgagtgagcggattggctggtcggtgttttgaagtgtgatgttgtcaatctgctgaaatgcaatctaccagctacacatttcccctgtgggagcgggcttgcccgcgaatgcaatgggtcagccagccgggtcaatcctggctcgccgccatcgcaggcaagccagctcccacacgtttgattggtttccacggttatttttgggtggctgccacatcgtagatcgcatagatcttctcgtagcccttggtttcaaacaccccggtccaacccttgggaatcgataccgactcgccagtcttcacggtcatcaccgtgccgtcactggaggtcagggtcacgccgccggcggtgaagtataaaaactcttcatacggtgtacccggcgcgctcagttcttcgcgcatggggccggatttgtacatgccgatctggaaggctttgtctgtggattcatgggtgactacgtcgacggttttgggttcgccgggggcgcttttcaccgcgtcggcgcgggcaaaaatgctgccggcgacgtcggcgtgggaggttttggtgggcttgagcgtgtcggcgattgcaaggctggtgcacaaaagcggaacgataaagcaggcagtcgcgagggtctttttcatgggctgtcttccgtagggcctgatgtcaggaatattcgccgatacaacgtttgggcgtcggagaatattcctgacgagcgatcacggctacagcgcgagccgatccagcaggctataccaggccacgcccgcaccaatgtaaaaccgttgcaacccatgcatcggcaagcgctgcagcggcgtcaccgggtaggcgaactcggcgttgctgccgcacaaccttccggccagttgctggcccaggctcgtgcacaaggcgatgccacgaccattgcagcccaacgccagcgtcagtccgggcgccggttcgtgaacgtggggcataaagtcccgcgtgatcgcgatccgcccggcccagcgatattcaaactccaacggtcccaactgtggaaacagcagcgccagcgagcgttccagatgggcaaaatccgtcggtgtagtggggtcgttgaacagaccacgcccacccatcagcaaacggccatggctgtccttgcgaaagtacagcagcaagcgctgcgccgtggacacagtttcctgccccggcaggatgctgtccgccgcgcgcccactcaacggtttggtggcgacgataaaactgttcgccgccaaaatgctctgcgccatccccggccacaggttgccgctgtagccgttggtggccagcaccacttgatcggcaatgacctgcgcaccgttcgccgtctgtagctgccagcccgcagcctggcgctgcaacccggtcaccgcgctttgcccatgaatacgtacacccgccgccagcgccgcgccgaccagaccacgggcatacgccagcggctgaatcgccccggcgcggccatccagccaaccgcccgcgaaagcttcactgcccatgcgtgaagccaccgccgctgcgtccagccgttgcaccggcaatccacggcgcgcccactgatcggcccgcgcgtgcaaaccagccacacctttttcggtgtacgaaacctgcatccaacccttgcgcaccggcgcacacgcgatgcggtgtttttcgatcagtttgaacaccaggtccgccgagtttgacacgctggcaatcaacggctcggcgcggtctggcccgtacatctgcaccagttgctcggggtcgtacttgagcgtggggttgacctgcccgccattgcgccccgaagcgccccagcccggttcattggcctccagcacacatacgctcacgccacgctcggccagatgcagcgccgtggacagcccggtatatcccgcgccgacaatcgccacatcgaccttcaccgattcgttcaacgcaggcgtgggtaccgcctgcggcgccgtcgccgaccacaatgatttcatggcaggctccgcacagcgccggtggggtgcagcacgcgtcgcaaaaagtcttgagtgcgcggatgctgcgggttgcccagcacctgctcggccgcgccgctctcgacgatgtagccgccgtgcaagaagcacacgcggtcggccacctcacgggcgaagcccatttcgtgggtgaccacgatcatggtcatgccttcatcggcgagggtacgcatcaccgccagtacgtcgccgaccagttccgggtcgagcgccgaggtgggttcgtcgaacagcatggcgtcgggcttcattgccagggcgcgggcgatggccacgcgctgttgctggccgccggagagctgttccgggtaggcgtcagctttggcactcaggccgactttttccagcagcaccagcgcttcttcgcgggcttgcctcggtggctcgcctttgacgtacaccgggccttccatcacgttttccagcacggtgcggtgggggaacaggttgaagcgctggaacaccatgcccatgcggctgcgcagcgcgtgcacggttttgctggcgcgttgcacggtttcgccgaacacgctgatgtgtccgccgtcgtaggcttccagtgcattgatgcagcgcagcaacgtggatttgcccgaacccgacgggccgatcaggcacaccacttcgcccttggccacgtccaggtctacgccgtgcagcacgcggtggctgccgtagtgtttttgcagttggtgaatctcgatcatgcttttttcctccggcccaggtgctgttccatgcggcgcaggccatacaccagcggcaggctcatcagcaggtagagcagggcgaccagggtatagacggtcatgttctggaaggtcgacgaggcgatcaactggccctggcgggtcatctccgccacggtgatggtggacaccagtgacgaatccttgagcatcatcaccagcgtgttgccgtaaggcggcagggcgatgcgaaacgcttgcggcaggatcacccggcgcatcatcaacgccgagcgcatgcccagcgcttcggcggcttcgcgctggccctgttcgacggcgatgatgccggtgcggaagttctccgcttgatacgccgagtaggcgatgcccatgccgatcacgcccgcgtaaaacgcggtgaggtgcacgcccatgtccggcagcacgaagtagatgtagaacagctgcacgatgatcggtaggccacggatcacgttgatgatggtgctggccgcccacgacagcgcgcgaatcggcgacagtttgagcagcgccagcaccaaaccgatcgcgctgctaagcaggaacgacagcacggtgatctggatcgtcaccagggcgccttgcagcaaaatcggcaggaagtcctgggcgttttgcagaaactcattcatgggtatcaagcccccatttcttgaggatggcgtcgagggtgccgtcggccttgatgcctgcgatggcggtgttcaggcggttgagggtttcggtgtcgcccttgcgcaccaccaggcagacttcgccgacgttggtgggcttgtagtccggggcgagtttcacgcctttgaacagcttctgacggatctggtaggccaccaccggctggtcgcccacggcggccttgatgcggcccagggacaggtcgcgaaccatctcgccgatggagtcgtaggtgcggatttccttgaagataccgagcttgttcaactggtcgtagaacacggtgccggcctgcacgccgaccacctggtccttgagcggcgtgaggtcgaggtaggccgtgttgtcgtcggcgctcacgatcaggccttcgccgtaggcatacaccggcgcgctgaagtcgacgaccttggtgcgctctgcggtcttgagcatgccggcggcaatgaagtcgagtttgccggaggtgagggaggggatcagcgcggcgaagttggtctgctcgatctggctggtaaacccaccggccttgccgacggcctcggccacgtcaaccatcaccccctgaatgctgttgctcttgatatcgaggaaggtaaacggcgaaccgctggcggttgcaccgactttgtacgaggacgcactttctgcgtgcacggccgtcacgcaaagcgtggcgcaaacacccaaggcaaggcggcgaaacaagggcaaaagactgttcatcgggttactccagaaggaaaacggaaagtcagtaccgcgagcggctgccgatgaaatcgcaagctctgtgccatttcgattgataaaaatcgtatgtcgctatggaaaatcgaaaaaatgaaccattcgtatcgatatgcgatatttattggtctatttttatgatttacggtagaaatatcgccacgcctgagccaactacgccgcgagtccgccatgtctgaagaacgcaacagtttgcacaaccaatccctggaaaaaggcctgtcggtgctcaaggcattcagcgcccagcgccgtagcatgagccttgcagaggtggccgaagccgccggcatgaccaaaagttcggcccagcgcatggtgtttaccctcgaaagcctgggttaccttcggaaacactcgcgcacgcggcattaccaactcacaccccgggtgctggagttgggcttcagttacctggatgcgcattcgttgatcgaggtggccaacccgtttctgtcggagttgacgcgcttgaccggcgagacctcgtgcctcaccgagccggcgggttacgacatgacctacatcgcgcggttcgtcagctcggggtttgtgccggtgcacatgccgattggctcgcgggtgccgatgtactgcacggcgtcgggcagggcgtatttgagtgcgttgccgcaggatgaggcgctggtgttgatcgagaacagccagcgggtggcgcacaccagccagacgttgacggacgtcgacaggatcatggcgtcgttgcagcaagtgcgcgaacaaggctacgcggtgaatggccaggaactgttcctgggggacatgaccatcggcgcgccggtgctgggggcaaacggccggccggtggcggcggtgcacgtggtggcgcccaccagtcgctggagccgggcggatgcggagaagcaactggcgcctgcgttgttgcagtgttcgagggcgttgagcaattcggcgaggaatcttgaatagaaatgctatcgagcagacaacacgatcagtgtgggagctggcttgcctgcgatagcggagtgtcagctcgcccattcggttctgacccaccgctatcgcaggcaagccagctcccacattttgatcttcattgttctttgagatttatgtgagccccaacaaaaaatgcgcccctacgggcgcatttttttgttcagtaagctatcaccctcaggcaatcgcatcccatgcacgatcaccgtgctcatccttgatccgggtcggcaagcccatcacgtccagcgccttgaggaacggctcagccggcagttcctcgacgttggccatgtgcttcacatcccactcgccacgcgcaaccagcagcgcagcggctaccggtggcacgcctgcggtgtaggaaatgccctggctgtcggtttcggcgaaggcttcttcgtggcaggccacgttgtagatgaagacttcgcgcggctggccatccttggtgcctttgaccaggtcgccgatgcaggttttgccggtgtagcccggggcgagcgaagacgggtcgggcagtacggccttgaccagtttcagcggcacgacttccaggccttcggcggtggtgaccggcttttcggagagcaggccgagcttgttcagcacggtgaacacgttgatgtagtgttcgccgaagctcatccagaaacgcacgttgggcacgtcgaggtttttcgacagcgagtgcacttcatcgtggccggtcaggtacaggttctgcgaaccgaccacagggaggtcgtcggtgcgtttgacttcgaacatggtgttgctggtccactggctgttctgccagctccacacctgcccggtgaactcgcggaaattgatttccgggtcgaaattggtggcgaagtatttgccgtgggaaccggcattgacgtcgagaatgtcgatcgaatcaatgcggtcaaaatgttgttgtgctgccagcgcggcatacgcgttgaccacacccgggtcgaagcccacgcccagaatggcggtgatgttcttctgtttgcactcttccaggtggttccactcgtagttgccgtaccacggcggggtctcgcagaccttgcccggctcttcgtggatggcggtgtcgaggtacgccacgcccgtgtcgatgcaggcacgcagtaccgacatgttgaggaacgaggaaccgacgttgatgacgatctgcgattcggtctcgcggatcagggccttggtcgcttccacgtccagggcgttcagcgcgaaggctttgatgtccgcaggtaccttgaggctacccttggccttgacgctgtcgatgatggcctggcatttggagatgttgcgcgacgcgatagcaatacgaccgagttcgtcgttgtgctgcgcgcacttgtgggccaccaccttggcgacacctcctgcaccaatgataagaacgttctttttcaattgctttatctctcctttatccgccagcttacgaaaggctggacaggtagtcgtcgtaacagaattcacgaaccacctcgactgtaccgtcgagttgtttcactacgatggacggcattttcaggccgttgaaccagtttttcttgaccatggtgtagcctgcggtgtcgatgaacgacagccgatcgccgatggccagcggacgatcaaattgatactcgccgaagatgtccccggccaggcaggatttgccgcacaccatgacagtgtgttcgccttcgcttggcgccagcttggcgttgaggcgatagatcagcaggtccagcaggtgggcttcgatggagctgtctaccacggccaggttcttgccgttgtagagggtgtcgagcacggtgacttcgagggaggcgctgttggtgatcgccgcttcgccgggttccaggtacacctgcacgccgtacttttctgagaatgccttgaggcgcgcgcagaatgcgtcgacggcatagtcctcaccggtgaagtggatgccgccgccgaggctgacccactcgaccttgtgcagcaacgcgccgaagcgttcttcaatcacaccgagcattttgtcgaacaggctgaagtcgccgttctcgcagttgttgtggaacatgaagccgctgatctggtcgatcacgccttcgatcttcaccgggtcccattcgcccaggcggctgaacggacgcgccgggtcggccagcaggtagtcggaactgctcacttgcgggttcacacgcaggccgcgcaccttgccttcgctgcgttcggcaaaccgctgcagctggctgatggagttgaagatgatcttgtcgcagttctccagcatctcttcgatttcatcgtcggcccaggccacgctgtaggcgtgcgcttcaccttcgaacttctggcggccgagcttcaactcatagagcgacgacgaggtggtgccgtccatgtattgctgcatcaggtcgaacaccgaccaggtggcaaagcacttgagcgccagcagagccttggcgccggactgctcgcgcacgtaagcaatcttctgcatgttgaccagaagcttctgtttatcgatgaggtagtacggcgttttgatcatttttgagagcctgcggcggtgcctgccaaaaaaggacacgcattgtgcccgcacttggatcagatcgaaaggttagcgggcggaaaatgctgcccttggttttcaagcgtagcggctaagtatgaccatctatagccatgcccccgtccaatgtgggagctggcttgcctgcgatagcggtctttcagtgccggctgtattggctgatccaccgctatcgcaggcaagccagctcccacctttgaactatgtcgctgatgagcacgcgcccggcgggatggtcgtgtcgggagttttttcgcaaacaccaccaatcctttgtgggagctggcttgtcgggtcgccgcatcgctgcgatagcggtctttcagtgccagctgtattggctgatccaccgctttcgcaggcaagccagctcccacactggatctcctccagacagaagagggcgccgctactggctgtaatcaaaccgtcatcgcctcaccgccgaattgccatattcccccgctactgtcctcgccaatgagatcgatctcaagcgagacacaatgactgacctgaaagacgtcgcccgactggcgggtgtatcccgcgccactgccgcgcggacctttgcttcccccgaccaggtgcgcccgaccacccgcgagcaggtattttccgccgcccgtgagttgggctttcgccccaacttgctcggccgtcagttgcgcctgcaaaccacccagttgattggcgtggtggtgcccaacctgctcaacccggtgttcgccgaacagttccaggccatggagcgcgccgcgcggttacgcggctacagccttttgctggcgaccaccgactacagcagcgagcgtgaatgcatcgtggtcgaagagctgctgcgccagcgtgtcgatggcctggtgctgacggtgaccgacgccgaaagcaacagcgtgctcagcagcctgaacaccgagaaaacccccttcgtgctggcctatcaccaaccgggcaaccccaattacagcgccgtgtcggtagacaaccgcgcgggcatggccctggccacccgttacctgctggaggccgggcaccggcgcatcggcatggtcgccgggcctgcgttgcagtcagaccgcgcgcgtctgcgctacgccggttattgcgatgccatgcgcgagtatggccttgaaccccgctcggtgatcgaaatgccggcgcacacgcaggctgaattcgccgccatcgaacccttcttgcacggcattgaggcacccaccgccttggtgtgctccaacgatttcctggccatcagcctgatcgccgagctgcgccgcaacacctggaacgtgcccgaacaactctcggtgatgggcttcgacggcattgccctcggcacccagatgcacccgactctgtgcagcgtggtgcagcccatcgcgctgctcgccagcaccgtgattgaccaactgctggcgcagatcgccggcaacgctccgatttcccattgcctgccttgccacatccggcccggcgaaagcactcaaccccacgaggagacgtttgatgcgcgcgttcagtaaaaccctggcagccgtgctgctgtgcggcgtggccagcctggcacaggcggccgagaccgcgatttgctacaactgcccgccggactgggccgattgggccactcaactcaaagccatcgccgccggcaccggcgtgcaagtgccgctggacaacaagaactccggccagtccctcgcccagctcgtcgcggagaaagctgcgccggtggccgacgtcgtttactacggcgtgaccttcggcttgcaggcgcaaaaagccgatgtggtgggtacctacaagcccaaaggctgggaccagattcctgcaggcttgaaagacccggccggccactggttcgcgatccactccggcactttgggcatcatggtcaacgtcgacgcgctgggcggcctgcccgtgccgcaaagctgggccgacctgctcaagcctgaatacaaaggcatggtcggttacctcgacccctccagcgcgttcgtcggctacgtgtcggcggtggcgatcaaccgcgcgtttggcggcgacctcgacaactttgccccggccatcgactacttccagaagctggcgaaaaacgcgcccatcgtgcccaaacaaaccgcgtatgcgcgggtgttgtccggcgagctgccgatcctggtggactacgacttcaacgcctaccgcgcccgctataaagacaacgccaacgtcgccttcgtgatcccgaaagaaggcagcatcagcgtgccctacgtgatgagcctggtggccaacgcgccgcaccgcgcgaatgccgaaaaagtcctcgattttgtgctgtccgacgaaggccaggccctgtgggccaaggcttacctgcgcccggtgcgtccgatgaaaatgcccgccgaggtggccgcgcagttcctgcccgacagcgactacgcccgggccggcgtggtggactacgaaaaaatggccgccgtgcaggaagccttcgccgcgcgttacctgaacgaggtcaagtaagtgggcaaacacgcaggctgggccctggcccccgcgttcgccgtgctgctcgcgttctggctgctgccgttggcgcacttgatcgtgcttggtaccgagagccgcgacagcagcgccagcggctattggcaggtgctgagcagcgcgcaatacctgggtagcttggggcaaaccctggtgctggcggtggtggtgacgctggtcgcgttattgatcggcggcatcagcggcgtgttccttgcgcgtcagcaattcttcgggcgttcggcgctggtggcgttgctgacattcccgctggcgttccccggcgtggtggtgggctttctggtgattctgctggcggggcgtcaaggcctgttcgcttcgctgggtctgcaactggcgggtgagcgctggatctttgcctactcattggcggggctgttcgtgggctatctgtacttctcgattccccgggtgatcctcacggtgatggccgcctgcgaaagccttgaccgcagccttgaagaggcggcccattcactgggggccgggcattggcgtgtggtgtgtgacgtgatcgtgccgggcctggcaccggccttggcgtcgtgcggggcgatctgttttgccacgtccatgggcgcattcggcacggccttcaccttgggcacgcggctcaacgtgacaccggtggcgatctacaacgtgttcaccaattacgccaactttgccgtcgcggcggcgttgtcagtggtgcttggcgccgtgacctgggccgtgctgctgctcacgcgccggctggtgaaaaacgcggggacggtcctgtgaaacgctcatcgctgttcgtgattcaactgctgttcaccctgctggtgtgcactttcatgttggtgccggtggtgatgtcgttgctcgccgggttgacgcgcaatttcttcgtcggcctgtccagcggcttgaccttcgactggctgatccaggtgtggcaggcctattcgccgaccgtgtggctgtccctgcaactggcattggcttgcgcggtgtgcgtctgcgtgatcggcgtgccggcggcttacgcgttggtgcgcatgaacaaccgcttcagccgcgccttcgaggaattgatggtgctgccggtggccatgcccgggctggcgagtgccttggccttgttgctgacctacggccagttcggcacgtttcgcagcagctggttgttcatcctcgtcggccatgtgctgttcaccttgccgtttctggtgcggccggtgatggcggtgatgcaacgccagcaactgccggtgctggaagaggcggcggccagcctcggtgccgggccgttcaagcgctttttcagcgtggtggtgcccaattgccgggcggggattctggcgggcgtgttgatggtggtcaccctgagcctgggtgagttcaacctgacctggatgctgcacacgcccatgaccaaaaccttgcccgtgggcctggccgacagttacgcctcggcgcgcctggaaatcgccagcgcctacacccttatctttttgctgatgatcgtgccgctgctgatctcgttgcaggccatcagcgcccgtttgtcccgtggagagcgtcgatgaccgctatcactatccgccttaaaggctgtcgcaaggcgttcgccgacggcaccgtggccgtgcatgatttgaacctgactgttgagggcggtgaaactctggccattctggggccgtcgggttgcggcaaaaccaccaccttgcgcttgatcgccggcctggaacgtccggatctgggccaggtgtttttcggtgatcaggacgtgacgcgcctgcccatcgagcgtcgcgatgtgggcatggtgttccagaattacgcgctgtttcccaacctggatgtggcagggaacattgtctacggcctgaagattcgcggcattcccgcgcccgagcgcaacaagcgctgcgacgaattgctggagctggtgggcttgcagcaccacggcaagcgcagtatccacgaactgtctggcggccagcgtcagcgtgtggcactggcccgcgcactggcgccacggcccaaggtgttgctgctggatgaaccgctggccgccctcgatgcgcaattgcgtgagcgcctgcgcagtgagttggaccaactgctgcgcagcctgggcatcacctcggtgtttgtcacgcatgatcagggcgaagccatggcactgggcgaccgcatgctggtgatggagcaggggcgcattgcccaattggcgagcccgcgtgaggtctatcagcaaccggcgaacgcgtttgtcgcaggcttcgtcggcaacctcaatgcgtttacggtgattgagccgtcagccaatggcctgaaagtctgcggcggcgaactgccgtggcacggggccgatgtgccgggcaccctttactgccgccccgaacacctgcgcgtcatggagggcgaagggcacctgcacggccatttgctggcgcagtttttccagggcgcccaaagccgcctgctggtggatgtcggcgcccagcaacctctgctggtggacagcagcgacaaccaattgcaccgcgtcggcgcgccgattgccctggcggttgcgccgcacaggttgttcaccctcaatgcctgagaccttatgttgaatcatccttttcttgtcgcgcagatcagcgacctgcacctcaaagccggccaacgcctcacttatggcgttgtggatacccttggcgcgctgcgccgcgccgtcgaccacctgaacgccagccacccacggcccgacatcgtggtcatcagcggcgacctggtggatttcggtcgcgccgatgaatacgccgtgctgcaccccgaactcgcccgcctgcacatgccgtgctacttggtgccgggcaaccacgacgcgcgcgggccgttgctggatgcgtttggtgatcatgggtatctgcctgcgtcggcagatggaccgctggactgggtggtagacgagcatccgttgcggctgatcggcctggattcgaccattcccgacggccatggcgggcagttgctcgacagccagttgcagtggcttgacgcgcagttggcgctgcaaccgggcaagccgaccttgttgatcctgcaccatccgccgttcatcagcggcatcggccatatggaccgcgaacccttcatcaacgccgcaggccttgagcaagtcgtcgcgcgccatccgcaggtggagcgtctgctgtgcgggcatttacaccggcccatgcagcggcgcttcggcgccagcctgagttgcgtgtgccccggcacgtcccaccagatcgtgctcgacctgcaagacagcgcccccgcgcatttcaacctggaaccggcggggtatttgttgcatcgatgggacgggcagggcgtggtcagccataacggcgtgttcggggagtatccagggccgtatccgttttatgacgcgaatgggttgattgactgaggtcctcagacaggcttcacccatcgccgggttagaaaaccaggcggcccacgtaagccattaacagcgccagcccggcaataccgagcagggtgaagacgagcgcggccacgtgtgccagcaaaaccgtcagcggttgcatgcaggtgcttcctgagccattcgggaagcacgattatgaaaagcggcggggcgttgatacagacgctgccggttatttcagtgataagcaaactgcacgggcagggccggcgtaatggccggcgcgttgccagccgtggcgaccacaaacgtacaagattcggcgcaacccccctcactagactcgtcagacttcttccagtgcaggttgcgccatggacattttcctctacgccttcagcgtcatgtacagccccggtcccgtgaatttcatggggctcaacgccgggctcaccggcaagttccgccgttccaccgggttcttcctgggcgtggggtgcgcgatgctgttgttgttcgtgctgtttggctacaccggcgaggcgatcatctcccaggcggcgctgccgtacatttccctcgcgggcgggctttacaccttgtacctcgcctatcaggtgttcaccgcgcggccggtggtggaggcgccgtcaagcgcgcccgcgaaaacccttacgttctggaatggcttggtgatccagttgctcaaccccaagggcatcgtggcggtgctgccgattaccagtgtgatgttgccggcggcgcatatcaccggcgcgtccatcgccggggtttcagccttgctcgggctcggcgccgtcggtgcgccgtgggtgtatgcgttgcttggcgcggtgctgggccggcggattaccggggcgacggcgtttgtggcgttcaaccgctgcatggggttggcgctggccgcgtgtgcgtacttcatgttccatgcgttctatctgcacgtcgcccagacatgaacgatcagtggttgtcagtgaaattgccagcgtccctgcgtgcagattagaatgcgatcaattcttaataactcttggcccagcgccggtgatctgcatgtcgtcttcgctcaatctgccgattcaggccctgtactgcgaacaccacggatggttgtatcgctggctcgaccgcaagctgggcaatgccagcgacgcggccgacctggcccatgacaccttcctgcgcctgctcacccgccacaacagcgccggtttgggcaatgaaccgcgcgccttgctcacccatatcgccaagggcctgatgatcgacagctggcgccgccaggaagtcgagcgtgcctaccttgacaccatcgcccatctgcccgagcaggaagtgccgtcgccggaaacccgctggttgatcctcgaggcgttgtatcgcatcgaagccatgctgcgcgacctgccgcagaaaacccgccaggccttcctgatgtcgcagatcgacggcctgacctaccagcagattgccgatgaacttaaggtgtcgctggtctcggtcaaacgctacatgcgcgatgccttcctcgcctgcctgagcgtggcatgaacccctcgatcgacccgctgatcctcggcgaagccgccgactggatggtgcagttgcaatcaggcagcgccaccgacgatgaccgccgtgccatcgcccagtggcaagggcgcagtgcgcaacatgcccaggcctggctgcgggcggaggcgatcctcggcgatttcaatacggtgccgggcgcgattgccggcgacacgctcaagcgcatcggccgcaaaaaagccctcggccgtcgtcaggcgctcgggctgctgctggcgggcccggcgacgtggctggcgtatcgctacacaccctggcagccgtggaccgccgaccaacacaccgccatcggcgaacaacgcccgctgaccttgcccgacggcacgcgcttgctgatcaacaccgcgagttcgttgaacatcgtgttcaccgaacaggtgcggcgtgtggatttgctgcaaggtgaagtgatgatcaccactgccaaagaccctgcgccgagccatcgcccgtttgtcgtgcagacccgccatggcaccgcccgcgccctgggcacgcacttcagcgtgcgggtcggcgagcagaacagccgcgtggcggtgattgaaggcgcggtgcaaatgctgccgcaacaggccgctcaaggtgtgattctccaggccggcgagcaaagcgcatttgaccgtgaccgtgtggctgccgtggagcctttgaacagcggcgcactgacatgggaaaacggcatgttgctggcccagcagatgcgcctggcggatttgctcgacgagttgggccgctaccgttccggcgtgctgcgctgccacgacagtgtggcggggttgagtgtttccggggcgtttcccctgcgagacaccgatgccagcctgcgcctgttgcaggaaaccctgccggtgaaggtcagcagcctgaccggttattgggtcaccgtggagccgcgctgagttttttcacctttcgctgatacctttttcgttgtcgcccggtgtaggggagaaccctcaacgttgcaccgccgacaggaatgcccatgaccgccagactgcacccacactgcccccgtccgttgaaggcgctgagcctggctgtcgcacttgcggccattgcgccgttgcccagtgccgtggcggccgaggcgacatcgaccgcttcggcgcgcagcttcaacatcgcagcaggcccgctgggcaatgtgttggcgcaatttgcggcgttgtccggcgtgccgttgtcgtttgacgccaaactgctcaacgatcagcacagcccgggcctgcagggcagtttcactgcgcaatcgggctttatgcagttgctgcaaggcagtggctataccctgcaaagtaccggcgccaatggctacaccgtggtgccgtcggccaatggggctgctgtggaactggcagccaccaccatcagcggcgaagccggcggtgcgcaggcggacacctatggtggcggccaggtggcgcggtcggcgcgcctcggcgtgttgggtaaccgctcgatcagtgacgtgccgttcagcgtagtcagctacaccgcgaaaaccatcgccgaccagcaagcccgcaccgtgggcgatgtactgctcaacgatgcgtcggtgcgccaatccgcaggcttcggcaacttctcacaaatgttcatcatccgcggtctgccactgaacaccgatgacattgccttcaacggcctgtacggcgtgttgccacggcagatcatcaccactgaagcgttggagcgcgtggaactgttcaaaggccccaacgccttcgtgaacggcgtgtcgccagcgggcagtggtattggcggcagcgtcaacctggtgcccaagcgcgctgaagaccttcccacgcgcagtgtgacgctggattacgccagcgacggccaggccggcggccacctcgacctgggccagcgtttcggcgaagacaaccgtttcggcgcacgggtcaacctggcccggcatggcggcgacaccgccatcgatgacgaaaacaaaagttcgcaattgatcgccgtcgccctggattaccgtggcgatcgcctgcgcgtttccaccgacttgggttaccagaaagaacgcatcaacaatggccgctccgtggtttaccccaacggcacaaaagtgccgaaagccccctcggccaaggataattacgcgcaggactggagctggtcggagcttgaggacacctacggcatgttcaatgccgagtacgacctcaacgaaaactggagtgcctacctgggcggtggcgccaaacacacacgggaaaatggccagtattcgtcgctgtatgtgggcaacgacggcagcgggcgtgtgggctttttgtactcaccccatgacgaagacaacaaaagcgccatggctgggttgaacgggcacttcaatacggggccggtgacccatcaggtcaatttcggcttgtcggggatctggggcgagcagcgctcggcgttcgaggcgatcctgcaagccaaccgcgtgccgggcaatctgtacaacccgacccaggtgccgcgcccgaccctcacctatttcggcagtgatattcacgacccgcgcatcgtcggcaaaaaccgcatcaaaagtgccgccgtgtccgacacgctgggctttattgatgaccgcgtgctgctgaccctcggcgtgcggcgccagaccattgaggtcgacgcgtggaacaccaccaccggcgcgcgcaacgccaactatgccgagaccatcaccacaccggtgtatggcctggtggttaaaccgtgggagcacgtgtcgttctacgccaaccgtatcgaagggttggcccaggggccgacggcgccgttgaccaacgtcaccaaccccggcgaagtgtttgcgcccaaccgcagcaagcaaaccgaggccggcgtgaagctggactgggaccgctacggcgcgacgttgggtgtgtaccgaatcgagcagcccaacagtgcgaccaaccgtaaccccaacggcaccaacaccttcagcgtcgacggtgagcaaatcaacaaaggtgtggaactcaacgtgttcggcgaacccctcgacggcctgcgtttgttggcgggtgcggcctggatggacaccgaactgaaaaagacctccaacggccttaccgacggtaaccgtgcagccggtgtgccacgcttccagttcaacgtcggcgccgactgggacgttccgggcattcagggcgcggccctcaacgcgcggttgctgcgcaccgggggcgaatacgtcaacgcggccaacacgttgaacatcccggcgtggacccgcgtcgacctgggcgcccgttatggcttcaaggcggacgataactacatcaccctgcgcgccaacgtcgagaacgtggccaacaaggcgtactgggcctcagcgtccaccgccaacaactacctgacccagggcgagccgcgtacggtcaaggtctcggcgacggtggatttctgatcgtgatgcggcgggccagccgcagggcactgtcatttatgacagtagaccgaacggcggtccgggtatttagtgtcgaaatatcggcaccggaaaatgattgtcggtgagtgccacccatcctgggagtgttgatcatgtctaatccatacccgtctcgctgcaagaatgcttgcggtgtttgtcatgaatgctccgatgcgtgttgcggctgtggagagggcgcacacgtgcatgtccatgttcatgtgcaccgtcactgttgttcgcgtgcagtggacaagccagtggcggagaagccggtggataagccggtggcggagaaaccggtggacaagccggtggcagagaagccggtggacaagccggtggcggagaaaccgttggaaaagccggtggatcaacccgtggcgttgccgatcatcaggtttgggcttacgcacttcgcagtgggcaacgacagatattctaatttccgcaagcaaatgcaggtgtcgtcaaactatggggagaaggggacttacaataaaattcaatcggtagcgttttcggacgctcttccagatttagtgtcttcaacgttgacggcggctcaattaaaagaaaaatatgatgtgctttttgtgggcgttcacgtcagtagcctgacatcagcgtacgtgccaaagttaaaagaatttctaagtttgaaaggttgtttgattatcgcattcgagcataccccgaaccagcaagcagatgctgttctaaaacagtttgagcatggtgccgctacacctgggtatttggggaatttggggggcgttggggtgtttgcagggacggagtacaacggatcatcctcttcgaaagaaagattaagcaattgttttggtgatacgttgggtgtgccgctcagagggacgggggcgatgatcatcacggaggataaactttctgcgggcagcaaagtaatcgccagcagcgggaatagcgtgctgatgtggctcatggggggggccaaaggcagagcggttgcttttagtgatatagatttactggcttacgacttcgcgggtgatgcaatagacactgggcagaagaaattctttcacaatatggttgcctatatttttgatcaggtattggcagcgcctcagtgatagtgggcctttaacgctattgaaagtggccaggtaagccgtggcgtgtggcaagtcaactcgcttgccacagaagcccggcgaactgcgcaaagccgggcagccacagacttcagagtgtgcggtttacctccagccggtcatacccgcgcaaccggtacagcaacaccgatgctgcccaactggcgaaaaaaatgccgatgatcaggtagccaagcatgccgaagctgtcgttcaaacggccgataaaaccccagaagtcgccctggagttgcagctggtccgagatcagccccagcgcctcgatgctgccgatgaccactgccaccaccaccgacaccagggtgatgctcatgttgtagtagatcttgcggatcggtttcatgtacgcccagccataggcgccaagcatcaggtgcccgtcgagggtgtccaccagcgacatgccggcgctgaacagcagcgggaacaccatgatcgaccacggtgacaagccctgcgccgcctgtgtggcggagatgcccagcagcgcgatttcagtggcggtatcaaagcccaggccaaacagaaaacccagcgggtagagatgccagctgcggctgatcagacgaaacagcgggcggaagatacgcgccatgaagccacggtcggccagcagcaggtcgaaatcatcctctttgtatacgccgccctgacgcacatggcgccaggcctggtagatcgaacgcaggatcaccaggttcatcagtgcgatcaccagcaaaaacagcgcggatactgacgtgccgatcacgccgccgacggccttgaaaccttcaaaatgcgctttcatggtggcggcggcgaacgccacgccgatcgaggccagcaccaccaccgaggaatgccccagcgaaaaaaagaaccccacggccaccgggcgtttcttctcttgcatcagcttgcgggtggcgttgtcgatggcggcgatgtggtcggcgtccactgcatggcgcaggccgaagctgtaggcgagcagggcggtacccagcaagatcgggtgatcatgaaacgccaccagtgcccacaaccaggcgccgaggttgatggcgatcaacaccccgtaaatgccaaacaatttgccgcgcacttcgcggttggaatcgctgaaaacctgggcaaggctgtggatcatcaggtaaaccctttattgaatttccgatacgtccaggaaagttaatggattccatcggcgtcgatgatgaaatctgcgggtttaaccagaagaatgacgatgagcctgaaggcgccgtcggccaagaccgcgatcgcgctctggaaaccggcgagctccacaccttggttcgccaggggcgagggcttcggcgagccctcacacccacgttgatacttatttggaaggcttcaggacctggtcaaacaaataggcgaccaggttatgcaaaaacttttcttgctgggtattgacgctgataccggaaaaattcagttttatcagctcgtaatcactgatcactaatactctctcatccatgtgccccaacagccaaagcagcacgttcttgtcagtgttggccaacactctactgcccgcaggcaattgtttggacgtgagcgccagtgtcgcagcgccattaagttccacgtcatcggtatcaccaaagtagtcgctggttttttctgtggcggatgaccttccactgtaagcggtgagcaggacagacgagggcgtaatgttgccggtatgtccaaatgcattcaagaaatcaaccatgccgggtgtgattttatgatcgcaggttaaaatcaggacgccgcctagagcgacataacctttcaaaagatcggcctcaacggccgtagacgctgttccatcaaggccgaaagaaataaggctgtactttttcttcagttgggcaggtgtctgggactgtttgacaatgtctttcgtggcatctgaaaacaccacagacttgatcttgttatatttcccgttcggcccatagtttttagacgacttgatttgagttgtaagctcggcagtgccgggatcacccaatgtggtgcccgaaaacccaaactttatggcccgtagccccaacgctgcgtcagcacccaggggcgttgcaggggctgatcgagaggcatgagccatccgggctgcgggagtcactgaactgacggtgtcatctggcgcaggcgaacagcatttattatgcagatgaatatggacgtgtacatggagcggttcgctgttgctgcaacagccgtcgtgatgtgcttgacattcctctggcatcaaagccgctggctcttcgttcgcgggtttatcagtgggctccgacatgattgacactcctgttagtaacggcggatcagtgttcaccgatgcacagtattcagattcatccgcaagccactaaacatcggatcccgcgcccggtctactgtcagaagttacaggtgtgccagcggcagtgcctgttaacgatgaggctcgacgcgctgatggaaaaacttaacgggccgtgtcggtgtcgatgatatctgcaggtttaaacagaggaagggcaatgagcatgaacgaacaatcggccgaggcggtgatcgcattctggagacaagccggccccaaacgctggttcgccaaggacgatggctttgacgaggcctttcgcgacaccttctacgccacccatatgcaagccgcacggcgtgaactggaaagctggctgggctcggcgcagggcgcgctggccttgctgattttgctcgaccagttcccgcgcaatgcctttcgcggtaccgcgcatatgttcgccaccgacccgctggcaagactgtacgcccaccgaatggtagaggccgggctggatcaattgatcgagcccgagctgcgcgcgttttgttatttgccgttcgagcactcggaagacccggccgatcaacagcattcattggcgctgaatcagcatctggatgccaacacctttcactgggccaaggagcacgcacgcatcattgagcggttcggtcggtttccccatcgcaatgaggtgttggccagggcaaccaccgctcaagagcgggcttttctggatgagggagggttctcgggttaacggcttgggtgcggcttgtgtcggcggattctgtagaagcacctgttagttctgacagtagactgagtgccgggtggggtgtgtagtaggtgtcagtcagtctcttcaagggccgatgaatacgggtgtttataattcgcccgccgatcaataaacgcctgagtccatgggagtttagatgatgtctgattcaagccaatcttcgcgtgatgtcagttgctgcgtaaacgctgtggcgtgtgatcactgtcctgatgattatggtgatgacggagcaaacgtgcatgtgcatgtccatgtgcatcatcaccctcattgctgtcggcctgcgcccgataaacccgttgtagtgcctgaaaaaaagccgaaggtattgccgactattaatattggatattcaggtgccacactcggcagtcctggttattccaagccgttggcccaaattggttcgccttcaaattacggggcgaatgggatttacaataaagttgcggcgataaagtttaccgatgcatcaacggatgtcattggctcaccgttgaccgcgttgcaattattggccaaataccgaatgctttccgtcgggctgcatgccagtgcttttaacccgacggaagcgcttaggtttcgggagtatgtgaaggctggcggcgtcatgttgattacgagcgatcaggcggcaagcccgggggcgacgaatgttttaacgcagtttggtcataccggctcctttgcgggaactcttgccgctccctacagtggtatgtcctctgcaaccgagacttcaagcaactattttggtgcctctactggcgtgccgctgagtgggaatgcaaagtttgtcatagcgcagtcacaacttccctccggtagcagggtgctggcggcttccggttctgagccccttgcctgggttgtaggcaacactgaagaacgcgcggtttggacggtggacgctgaactgatgatcactaacgttgatggaacaacagtcgatagcccgcaggagattttcattcataatttgattgccttccttattgataaagtcttgttgaatacccagtgatatccgctttttgtagtcgcttgtaaaacgataaaagtgatcgtgcaaaccgatcacttttatcgttggcatcaataacatcagtgcttttaatgagggtgttctgaattcgccattcccgccaggaatgcccccataaaaactgtgcattgtctttccgttcgcagatctcgtagcgtgagctttcactcaaagagacccgccatgaacgctccctcgttgcgcctgtatgtcgatacccaattcaccagcccctatgcgatgtcggtgtttgtcaccctgcgcgaaaaaagtttggcattcgacacactcaccgtggacctggataccgcgcaaactcaacaagccgactttgcacgactgtccctgacccggcgcgtgccgacgttggaggacggcgacttctccctgtcggaatcctccgcgatcagcgaatacctggacgaggtgtatcccgacacaacggtgtacccggccgacccgaaacagcgggcgagggcgcggcaggtgcaggcctggctgcgcagcgatttgctgccgatccgccaggaacgttcgacgctggtggtgttctacgggcagaaaatgccggcgctgtcgccggtggccgaggcggctgcgcgcaagctgatcggcgcggcgcagacgctgttggcgggcaacccggataacttgttcggcgagtggtcgattgccgatgtggacctggccgtgatgctcaaccgcctgattctcaatggcgacagcgtgccggcgcagttggtggcctacgccgagcgccagtggcagcggccttcggtgcgggaatggctcaatcaaccccgcccggcgctttaggcgttacagccattcctgggccacgcgccggtccagctcttcccagtcggccatgcccaacacccgtgtggtgttcaagccgcgcaggtaaccgcgcaattgctgggcgctggcgtagcgttggtcggcatcagcggcttcatcctgaaacacgctttcatagtcggccaggtaatcggcgacgcgctcgcgaaactccggcaaaacggcttcgcgaatgcggtcgaaggttttctggtggggcttcatggcgtggtccttataagttttatgtgagcactatcggttcagataatagtcaccatcaagaatcgcaagttctgttttttgtataagagcgcaaaatcgctgcatcaagacgctgctcaaggaaatgcgcgatgaggacgataatccagctggccttaatgaccatgatgctcggcgccgtggtgctgaccaaccccgcgattgctggtgaactgcgtacaggccatttgctgccgctggccggtagcgtagactccctggcgcgcgcgcagtcggtgggtgtgttgtacagcgaaaacacccgcgacaacctcagctaccttgagcgctaccacgccatggccctgaacggcgctaaagatgacctcgacgggcgtatccgcgaggcgttcgtcaacagctccgaccctgaattggccattgattggttaatgaactcgttgcagggcacttttctatcggtcacggtctatagcagcctggatgaactggttcaggcgcacccggacgtggtggtgatgctcgatacccataaccaattgttgacccagcgtaacgacgtggtcgaggccatgtttaccgcacggttctatgacgcggacctgcaatacatcggcaaggcccaaggctcggtgcgcaagcaggtgtcatcggtatgggtacacgacaaggcggcccccgaaatcgccgcgcagattgaacagcagcgtgatgtacagctcgatgccttgaagcagtttgatgcgtcgctcaaggcactggtccgcgcaggatgacacgcgggctgatgtgaaccctatttgctcttttcaggaatgtttatgcgctcttttttcgccccggccctggctttttcttctgtgttgctgaccggttgtgtcactgctccaaacgctccaaccctgacgctgcaaaccgacaagacgcctgaaggctacttgcagtgcgtgttgcccaaacttgaaaagcacggcatcacctcgaccgtgacgcagaactcgcgccacgccaaggtcgtgttgaccagcaaaattgcggccgatgacgtgctggaagcatacaaatcccaggacggcaccaaggtgttcctgtatgagcgcaagccgctggcatcggcgatcaagccatcgcggctggagatgacggcgcaagactgcaagtaaccccaggccatacacaaatccaaatgtgggagcgggcttgcccgcgatgacggagtgtcagccagtgattcattggctgattcaccgcaatcgcgggcaagcccgctcccacattttgattgttgtagggctagggtttcgcttcgttgctgaagctgttcaccgtactgaccaaccctttagccgccaacgccaccaactcaccgcctttttccaccgtggccagcgccgggtccgagcccatgcggccgtcgggaaagcgtgcgcggaagtccagggcttcgcggatcggcccggtgttggcgatttgcggtgaataatcggcggtcttgatcgactccgggtacgcccattgcgtcaccgcaatttccgagggcgtggcgtggctgccgtggccgaccgggaattggcggtgggccagttcgttcacaccttccaggtcccaccagttgaccagtttcagcgcaaagccggccgggcggcgggcgaagctggcttcggcgtacagctcggaaaacgccgcttcaatggtcgcgatattgccgccgtggccgttcaggaacaggatcttctcgaaaccgtgcccggccagcgagcgcacccaatcgccaatcgcggcaataaaggtggaagggcgcagggaaatggtgccgggaaagcccaggtgatgctgggccatgccgatattgaaagtcgggccgatcaggatgtcggcgtgtttctgcgcctcatgggcgatgatttccgggcacatccagtcggtgcccaacaggccggtggggccgtgttgttcgttggagccgatggggatcaccaccgtgcggctgcgctccagaaactgcccgatctcgatccaggtggatttatgtagaagcattcgacgctctcttttatctgtggggacaggctaaccaccacggattgtacgactactcgccacttgttggggcttgcagttgaggtacgtcgaagacttcaaccagcgctggtccgggtaccaggaaaacatgaattgcccgtccttgagcttgtccaccacctggcgcgccacctgcgggcgcacggcagggcagccctggctgcggccgatgcggccttcgcgcttgctccaggccgggtttacatagtcagcggcgtggatcaccaacgcgcggtcgcgggcctgatcgttgaaaccgggttccaggccgtccatgcgcagcgagtaaccgtgggcacccaggtagctttcctgggtgcggaacaagcccaggctggattggtggctgccctcgaggttggagaactgggtggcgaagttttccccggatttggcgccgtgggcgaccaggtcgcgcagcaccaaggtctttttgcgcaaatcgaagatccacagccgacgggcggtcgaaggctgggagtagtcaatcacagccaggcggtccgagcgttcttcaccattattgaccgcacactgcaccgcgctcagggcgcttttcaagacagtgggattgagttctggagccgagcgcgccaggctgctatacaaagtaggaaaggtctgattggcggcgagcgcagaattgctcagcgtagccaggcttatggccaacaggccgaacaggtatttaaaagtcagcatctacagtacatccccccactgtggattggagcgtagccaattgttcaaaaaacacgcatgttacttgagcatttgcttgctcgttgcgccgctggtcgcgacagccgacgagctgccggtggcgccgatcccggtgatcgccacaagccccgtgcaacaggccttggcgcagttgcccagcgtttgccccggccttgccccgcacgtagacgccgccgccctggcgcgcctgcaagccttttaccaccagcagggtgatgggccgctgtggtccgccgccgagcgccgccacgccttgcaatctcagttgcagttattggccgacgacggcctggaccccgtccactatagcctgcctgcgccggatgccacggccaacgtgctgtgcagcgatatcgacgtgagccgccagtacctgcaagccctgcaggatttgcacttcgggcgcttgcagcaatcgcgcttcgaacccttgtggcactcccaaccgccggcccgcgacccgaataccgaagtgttggcgttcgccgccatcggtttgcaggacatggcccaggccttcgatcaggcgcgccccagcgccgatctctaccgcagcctgcgcaatgcctattccacggtgcgcctgcaacccttgccgcattgggacccggtcgccaccggcccgttgctgcgccccggcatggaagacccacgcgtgcccgagctggcgcggcgcctggtcagcggcggctacctggccaaggcccccagcggcaagcaataccgtgacgagctggtcaaggcagtcaaggccttccagctcagccactcgctgcaagccgacggcgtgatcggcgccggcaccgtggccgaactgaatatcagcccggcggtgcgtcgtgaacagctgcgcatcaaccttgagcggttccgctggctggcccaggacctggagcccgagggcgtactggtcaacgtcgccgccgcgcaactcagtgtttatcaaagcggcattccggtgtggcaaacccgcctgcaagtcgggcgcgccgagcgccagacgccgttgctcaagtcgcgtatcacccgactgaccctcaacccgacctggaccatcccgccgaccatcatgcgcgaggacaaactcccggctattcgcctcaaccctgaatacctgcgccagcaaaacctgcaagtgctcgaccccgaaggccgcccgctggcccccgagcaaatcgactgggcgcgccccggcaacatcctcctgcgccaggacgccggcccgcgcaacccgctgggtaagattgtgatgcgctttcccaacccgtattcggtgtacctgcacgacaccccaagccagccgttgtttaccaaagggccgcgcgccttcagttcaggttgcgtgcgggtcgaacagccgctgctgctgcgtgacctgttggtgaccccggccgaacgcacccgtaccgatgaactgctcgccaccggcgtaacccatgaattccgcctggccacacccgtgccggtgctgttgagttactggacggtagaggtcaaccgcgagggcgggttggtgtattcgccggacatctacgggcgcgatctggtgttgatgaaggcgatggggagtgtgctctgatactcaattggggtgagcgcgtctcctgtggcgagcgggcttgccccgcgttgggctgcgaagcggccccaaaaccagcaccgagttcttcctgaaacaactcgatgtttttcattggggctgctgcgcagcccaacgcggggcaagcccgctcgccacaaaagcctgccttgcgacacatatggaaatccagtagtacaggatggcagtccagccttggctagtttgaaaactcctcaataccaaaaggcgcaacggaatgccgcttcaacccaactctcaccggctacgtcgtggccgctattcagaaaccggtcgggcttatctggtcaccgcagtcgtacatcaacgccagcccttgttccgtgactttcacttggggcggttactggttgctgaactcaagcgtgtccatgacaaagggctggtcaactcgctgacgtgggtggtgatgccggatcacgttcactggttattcgatctgaagaattccaccctgcccgatgtgatgcgtcagaccaaatcccgcagcacgctcagcatcaacagtgcgcgcggcagtaaggagcggttctggcagcggggttaccacgaccgtgcggttcgggctgatgaagatgttctgagaatggctcgttacgttatcgctaaccctttgcgggcggggttagttgagcgcatcggagattaccccttgtgggatgcggcctggctataaccccaaggcgaacgggctgatttttttgtggcaagcccgctcgccacaggaagcctgctggctacaggagtctggcttgttagagtttgagggcggccacggcttgctccagtgtcatcacggctgtatcgatcgtcagtggcggcttatcccacggctcatactcatgtgccaacactgattgccagctcggcggcgtcaggccgggaatatctccggtacgcgcttccacgcggcgctgatgctccagccggtcagagcaaatcacctgaatatccagcaactcaacgcctgccgccgcagccgtggctttccacgcctcacggctctccttgaccgggtttacgcagtccgcaatcacggcatgccccaagcgcaaattactcagcgccagaccattcgccaccttgtaaccgctggcccccacccacacaccggcatcgcgcagggcctgctcgatcacatcaatacgcaggtacaccgcgccagtctggcgtgcgagttcgcgggcaatcgtggttttgccggtgccgggcaggccgctgaatacaataagcatcgtcaatcctttgagaggggagcctggccagtctagccgcagctatttcaaatagcaggcactgatccagtccgccgggtgctctgccaattgcttggccaccggcaggtaacgcgcgtcgagctgcgccgccagccagaacagtgtggcgctgcttttgggttgccaggtgccgctgtagccggcttcacccacgcccgcgcggtctttgtcgaattgcacgtgggtgtgcacgaactcctggtggctgcgttgcccgttggcatagggcaccagccaatccagggcggcggcgagggaggcgccattgctgttgaggttcagccagtcttcgccatagggcttggccgccagcgcggcctgcaccagcggttcgaggtcgtagaccacgtaatgcagggcgtcgcggtcctgaaagtcggtgaccgaaccgtcgggcaacacgttgtcggcgatctgttgcttgaacaactgatgcgcctgctcaagcatcgccttgtcgcccagcgcagcggccgccacgctcaccagtttgacgcgatggctctgccagttgttggtctgggtgccttttttctgcccgtggaattgctggatacgggcgatatagccattgcccaggttgctgatcagacggcggctcgccgcacgggtttccagacccaaatggtcagcggtcaacgcgtaggcgttgatcagcatgtcgaggttggtttcgtcgatggggttgaagtccggctgatacacgtcggcccaggcggccaggtagttgtcgacttgcctgaggtaacgcgggtcaccactgatgcgccacgccagcgcggcctggcgcatcagcggccagtctttctcggcggcgatgctctgttcgcgaatgccgtggttcggcaacgtaccttcggtgtgcaggtgcgccaacgggttgggttgatcacccaagtggcgttgggccgcggccaaaaaagcggtgttcgccggatttgacgcaaccggttggcagaggttggcggccaaggccgaatgagacaacacgacgagcaatgcggacagggcaacggtggttttattcatgggcgactcaagtgggctcgaacgcactcacgctagcacgcggccaattgtgcctggatgaaactgtagtgagcgggcttgccccgggcattcagccaagcgcagcctgaaaagccacggtaaacgtcgtgcccccgttggcgcaggaactcaccgccacatcgccgccgtgcaccctggccagttcgcgcacgatatacaggcccagcccgacgctgcgcacgtcgctgccctggtcgctgccctggtcggtgccccgggtcatgggctcgaacaacaccgcgatcagcgcttcgggaatcaccgcgccatggttgtgcaccgccacctcgcagccaccgtcgccgaggcgtgaggtgacggtgatcggctgttgcaggtcgccataggccacgctgttggccaccaggttgccgatgatctgctgcacccggtcggcgtcgaggcaggcatcgccccggccttcggtcttgtgttccagcgtggcggcggggaaggccacgcgcagctcatccaccgcgcgatggatcacgccgtgcaagtccagcggcgcggccttgatggtaatgccctggccaacccgcgcctgggtgaagtccagcaggtcggcgatcatgcgctgggcccgctcggacgactggccgatgtgccccagcaactggcgctccttggccgtgcgctcgccacggccgagaaagtccgacgccatgcggatcgccgtcagcgggtttttcaggtcatggctgacaatcgccaccatctgctcggcaaacagcgcgcggcgctgggcgatggcgtaggcctcgctcaattcggcctgggcctgcttcagggcgagttccgtcgcggatttttcctgcaacaacgcttcggcgaggttgcgcgcgttgagcagctcgcgctcgtacttgtcacggtcggtggtgccgaacagcgccaggtcgtacaccgtgctgtcggcgttttcgcgcttgatgccgttgagcagcacggtcactttgtggccgtcctggtgcagcatgtcgagcttcacttcggtgacgctgccgcgcaggcgcagcatcggtgccaggtgcgtctggtggaaaatcctgccgcccatggtcagcaagtcctggaagcgtcggctacacagctcggcggtgctgaaccccagccagtcgctgaagcgcgcattggcttgcaggatcgtgccgtcttcggccgtgacggccagggcgcacgcggcgctgtcaaacaggtcagctggcatgggcgaccgcccacggcgccaaaaacccttccatcgccgccgcgcatgcctgtggcgcgctcatgtgcgggcagtggccgacattgtccaccaggcaataggtgctgttgggcaatacgctgtgcaggtattcgcccacggccaccggggcgatcaggtcgtcgctcgattgcaggatcagcaccggcgtggtcaggccggccacgtcctggcggttgtccgatgtaaaggtgacccgcgcaaactgcttggcgatctcgggctcagtgcggcagaagctgtccgtgagggcttcgctcaacgccggctggtccggcgcgcccatgatcaccggggccatggcgctggaccagccgaggtaattgctgtcgagggtgtcgagcaggtcgtcgatgtcgctgcgcttgaaaccgcccacgtaaccggcgtcatcgatagagcgcggtgacgggccgatcatcacatgggcggcgatgcgcccgggcgccaggcggtcggcgagggtgccgatcatcgcgctcaccgaatggctcaccagaatcaccgggccgcgggcgaactcattgatcaactcgttcaagtcgcgggcgtagccgtccagcgtgttgtacttggttttgtcgaacgccgtgaggtccgacaaccccgcgcccaccaggtcatacatcaccacccgaaagcgatcgaaaaattgcggcgcgaggtaattccacatcgcctggttgcagccgaacccatgggaaaacaccagggtcgaagtgccgctgcccatcacactgacgttattgcggtgctgcaggttcatgggcttctcgattcatggcgttttgctacgtgcgaggagtttagatagtcaacgccgtggggtcacgcgttatacgtcgataaggtagagtcgccaccttcaggaagaaacttcaggtaacaaagcatgatggcgattttgcggcaaaccgtcttgagcctgctggcgctggtgcttatcggcctgctgggcaccgcccaggcggacacttcgcccatcggcgtggccctcgaccagcggctgatcgacctcaccaacacgctggacgccagcaccaccacgcgcctcaaagaccagctcgccgcccttgagcagcgcaaaggcgcgcaagttgccgtgttgctggtgcccaccaccggcggcacgagcatcgaggactacgccaaccagctgttccgcgcctggaaactggggcgcaaggacgtcaacgacggcatcctgctggtagtggccaaggacgaccgcaaggtgcgcatcgaagtgggttacggcctggaaggcaccgtcaccgacctgctggcccatcgcatcatcgaagaacacatcaccccagcgtttcgccagggcgactacgcgggtggcgtgcaacaggcggtcaatgacctgagcgtgctggtggacggcggcgacctgccgcagcccgccgcgcgggaggtcaacccgcagatcattgccgtgttgctcgcgttcatcgccggtgccatcggtggcgtgttgattgccgcgggcaagctgcactggcgccgggcgttgatggccaccgcgctggtcacgttgttgctggcgatgttggccggcggggcggactggctgctgtttctgctggtgatgccgctgacaatgctgatcggtggcgccaccttcggcgcactgtggctggctcgtgcggtgttttacggcgtggtggcgttgctggcgtacatcgtcgggctgctggtggttgaccactttgtcgaagtcaacttcgtgcactggctggtctggccgctgggcagtgcgttggtgctggcgctgtatgcagggctgttcttcgtcatgcgcgagtcctggcgcaagagcccgcggtttttcatcgtgcgcgtggtggccgtggcggcggtgtatgtggcggtggggttgttgctggggcatggctaccaggattggctggtggcgataccggcggcgtcgattgtggcgtttattctgtttgttgcgagtatttccgatggcggttctggcggtgggtcgggttcgagttcgggcggttccagctccagctcaagcagcagctcgtccggcggcgggggatccagcggtggtggcggggcgtctggcagttggtagacgattgagcctgtttccgtgacgaacgggcctcctgtggccaacaggctcttgtggcgagcgggcttcctgtggcgagcccgctcgccacaacagcccgctcggcgccaggtcatcagctcggcttgtaacccacccaccccttaaagctgaaccccgcataaaacaactcaaccccctcaaacccggcctcagccatcaacgccgcatccgcctcaggcgacagcaccggcaacttctcgctgatcgccgcaatcgcccgctcggcatccgccgccggcacccccgaatccaccgcaaacgccgcataccgcttcaaccaacgagccttttcctccggcgcctgcggaaaactgtggtgcgccaccaccagcggcgcccccggcagcagccgttgccataaagctttcagcgtttgcagccgctcctgcgccgcaatgaaatgcaacgtcagcaaacacgtagccccatcaaacggccccagtggcgccgtatcgatatacccctcatgcaactgcgcacgctcactcaacgaccccaacgtcgcctgcgcgagcttcagcatctccgccgacgggtccacccctacaaaccgccaccccggctcggcgtcggcaaagcgcttcaactccagcccgccccccgcgcccagcaccaacacattgccggtggccggcacgcgttcacgcagcagcagggtggtcatgcgttgcaacccctcaaagcccggcaccaggcgcacggggccttcggcataacgggcgacagcatcggggtcggaaaaaaagctcatggcacgctcctgcggatttggcgaggcgtaaaccctactgcggcgcctgcacagtggcaacattcatggtaaaacgtcggccttcatccccccgagtaaggacgctcaatgcccgccatcacccttcgcctcgccacgcccgacgacgcccaatgcatcggcgtgctgggcatgcaagtgttcctcgacacctatgcgacccaaggcatccgcacctcgattgccaccgaagtgctgcaagccttcgccccggacaccatcgccgggttgctggcccagccggacgtctcactgatggtggctgaagccgacggccacctggtcggcttcgcccaactcaaactcaacgcgccacaccccatgatcgaaacgcccggcgtggccgaactgcaacgcctgtacatccaggaacgcttcaccggcctgggcatcggctaccaactgctgcaagcggcagaacagcgcgcggcggcgggtggcgctgcgctgttatgggcgacggtgtgggtgggcaacgaacgcgcgctggggttttacccccggcgcgggtacgacgtgctgggggaaccgacctacagttttcagggcgaaacccatggcaaccgcctgttcggcaaagccctgagccctaaagctgcttagacaaaaacacccggctgctgccctgcggttcacacggcacctcgccaaaccgcacccagccatgcttctcgtaaaaccccggcgcctgaaagctcaaggtgtacaacaccgcattcgcacacccccggcgtcgggcctcgtcttcaaaggcatgcaacaactggctgcccagccccgaaccgcgcagggattcgggcaagtgaaacaggtcgagaaacgccatgcccagggtggttttgccgttgatgcccccaagaatttgcccggtggccgggtccttgatcaacaccgtcaacgggcgccggtcgttgtaaccagtggcggcctcgttaaacaccgcaagggcattgccgagaacaagctcggcctccgcgctgtgctggtcgctgacttctacaatcggcgccatcatcacagctccatgaccatttcatgccacgccatccctccatgctccgacggcgacggcttcacatacccatagcccatgcgcgcatacagcggcacatgctgctccttgcacatcaaatgaatcgtctgcttgcccaggtcgcgcatgcgctgcacaaactcggtcatcagcaccttcgaataccccttgccctgctgcgccgggtcgaccaccaccgacatgatcaccacattcggcgcctcggccgaatgccccaccaactccttgaacgcctcgtccgacatcaccacgtcataggcgcaaccacaattgataaaccccaccaccacgccatccgcctccagaatcaaaaagccctgcgggtactgcgcaatgcgcgtggcaatcttctccagcgtcgccgcttcatcgccttcgtaggcagtggtttcgatttcaaagcagcggtcggcgtcggcggggagggcgttgcggaaggtgagggcgggcatgggtgtttcctggggcgttgagcgaaaggacccatgataggcatccaccgacaacaccgccacagcggttgcggccctcacaccctttctacgacgagcaaaaatcaaactgtgggagctgtcgagctttagcgaggctgcgaagacggcagcccagacaccaaaaatctagctccttccgccaatatccaacccaccaaaaaccagaaaacccgccaaagcgggttctctcacacctcaaatctcatcaagccaccacaggcgcgtcaaacccccgccgctcaatcaccaaaaacacatccgccacatcctgcaccataatccgggcagtattggcgacggtattgatgtcgtgctcgacatagtcggacacgctggaacaggccatcaggttcagataggcgagggccgcgttcaagcgctcgctggcgcaggcgtgaagctcgctgagcggggcgtcgctgtcgatgagcaggacggggtagtcggtggcggattgggagatgggggtgaagcggcggggtgggtgttgagtggtcaagatgaaatccctaagaaaagaaaaatatggaacggccgttgaaatgcatcgccgtggattggctcagtcagggtcaacggattttgtgggtaattcttttttagggctgcgaatcccatcgccgatcaggctggcgacggaggggactatagggagttgattttggcggggcaacggggggcgttgcaggtgtagaaatggtttgtgtgagcagtggctattctgcgagcgaggttaattctgggtttagctgtctatatcgggtgtttagaaaagatgcgtgcttgaagaggagttggcgtggtgaaagtacccttcaattttgtgagatgtttcttactgatttttaggatggtttggcgtgattcacaaagctctcttctgcaggtatctcatgcagaagaagagcttgagggcgcagcgaatttgctttaatcggacgctaatcctatctgcatggcataccacgcgcctatgtccatacaaccgtccccaacataacggccaccaaggcggcgaagaaaaccttgcttagcctcttctgtggatagcctcaaccatgggctatcttcaccatacgagactaagagctgtccatttgatgcacgttcggctttgtattgagcgaactcagtttcgccgtcaacagcttcatggagagcgtacacgtcctctacttccgtctgcacagcatcgtcgagccattcgtcaaaatcggtcagcgtaagtcttgtcattgctaatctcctcaagttgccctgtgcgaaaagctcatccctggatggacttttccttagatttaatctgcgttagtgcaaactgatattttgcaactagaaatcagccacctgcccgacactcgcttggccattacacttcgtcgaaatgagcgtagccaagaattcattcggtttagaaatgagtgaagcacgaacaatattgatcattttcggaaagtgcgcgggttcgccagacgccctgaagtagtcagaggccgcatccattccgtgagcgaaatgtttttttgcctcgtcatattgggcgaagcgttctagcgcgacaacgcacattgcctccctcgccatgcgatcttgcgggcttgagtcattagtcttgtcgccgccacaggccgatagcaaaataatcgcaatgatagcgagtgacagccgtgcgtagatcttcatggctttttctagatttctcctaaccacgcccaatatgcctgtccaagttccatcgtggcggcctgtccgcctgacacgcctcgtgctttaagcttggatatctctttttcgatccatcgcatcagtgccgctcggccttgcggacattcgccgtatcctgtttctaaagcagcagcaataccttgaagctgttcggtactcataactctttccctatatgcctagatttgggaactatttacattagctgcccgtagctaaaatcggacttgggtcgagcgcgccctctaggtatttattgcgttcggtaaccaagtgatggggtgtcttgttcttcttgatactctacatggtatacagatatcagttatctcatccattcgcccgtgatttggtcgaagcttagatctttccactcctctttccacagttgccagtacggaatgtcggcggacgatggcgccggatcgcaaacgtctatttttactagagaaggcattaccaacgaatctccgatcaatagtgcttccccggcgcctaagttaggtagtttttcaatgagcttgcccaatgtgtctgggagcaacctgcgaacataattttggtcgctaggattggtcaggcgcatagcgacaaagttgttgcattgagagaagatggtttctgatatctctgatggccgctggctagaaagcatcaacgtcacgccatattttcgaccttctttagcgattcgctcaatggattgcttcgccgctcgatgttttgccagctcactggtagggacgtacttgtgagcttcttcgtacactaataaaattggagcgtcattgttaatggtctcaccatttttggtcctgtacaccttgtagtggtagccgtgctcaaatataagtctcgaaataagagaaactgtgatgcttaatacttcaaacgggattccgctcagatctataactgttacgttggcgcattgttcaggttgataacctatgaggcttcgaagtgttccctccagtgacgcagctttggcgttgggcccaaagaggaatcgcaatcgctcttgggaaactttagattcgaagcgtgtgaagaatttgtctaaagatccatcagcatagctgccattagtgatgctttggggttttgtcgggtggaattctaatttctgttcaaagtactttagaattcgttgttcttctccaagcggtataccggtagtaggttctgttttaccttcgctcaataaggagtaagtgccgtcgtttatcatgaagaggtttgagtttttggagtttactgtttcgttttttatattgcagagagcgtgcagaacttcatgtatatcgaagaacacagggctgtcgtagaagatttttgtggaggtgcgattgtgttttttcttgttttctgtaactaggtagcggaaaacggaggactgattgtagttgtctcgctctccagtgtcgagaaggacttcttctagttcttcgctattgagcagccagtaagggaggtttaggctattaatatcgatgtggttggcgttagggaatgctgttttgtattctgaatggatatcaaatattattgcgtgagagttgtttggggtcccggattcagtttttgcagtagatgtctgaatgattcgagcaacagtgttcgatttgcctgcgccggtagatccaacaacagcaatatgtttgttgaaaaatttatttccatcgacaggaactctaatttcagggtcagtgagtaacccggaaaactctagttttttttcctcaggtacggagtcctcgaaaattttcctgatgtcatggagggttgcaggctcaactcccgtcggtggaatagttaatgcgtctcctccccgaataaatttcccacccttgatcactcctaatggcagagcttcaatcacgtgccggcggtttgctcgatcatctacttcaattaaaaagctttcgataatggcaataagaacgcagtcttcatgatcggttatcctgagataggaacctacgcggagtaaaggatgtccgttagtaaagctacctaggtcgtctacgcagatttttactttgttggggtaaactgctattacctctgcttgcggctttcctgtcatttgagaatttccttgatgtcttccagggagtcaatttttattgttgaataaagtgctccacttggggcgtctaagccgagtataggtgtgttgtgataaaattcaaatatttcaattgggcgaaaaatgaggtgcatgtaatgtgctgttgaaatcaactaggtcgtcgattagctttagtcgcgtgtttgagtgcgaagtaggtccttttgtgattgagtcaacgtagaagccagaatttttgaaaacatagccgtctaggaaaattacacttgctgctcgaagagaagatttcaggtctttatgtttcatctcgtctaagttgctgaagtggaggtaggggcaaaatctatcgctgtcgggggttctagggctagagcgattagagaatttgctactaactatcagtgctaaatttaggagggatttagtatctgagctattggggggtaagtttataatgaaaaatcgtgctttgttctcgagtgacgtggcggcatgttgactgaaatattgttctcgcaccagttgggcgtatttttttgcaccttgatattgttttagccagctactaaatagtagatttttattatttattttattaatgaagtgactttttgtagtctgacggtcagccaggtttggctgtattgcaaggcatcttatgcggtctattgaggcagggtaaaacagattttcaacatcctctcgtgtggcgccagaaatagtcgaaatcaaaagtttggtgatgctctcgatctggctctcgtaactttcggcgtatacgtcgatatccaattgggcggcaaactggagtatctcagggtctgtaattttgtattggttgtgaatgagttcggcaggggcctctttcttttgcgttgttaagaaatgcgtttttatgaattctactgttgttttacttttttcgggaagtttttcttgaccgcttttgtaatgtccataaagtttgtatgtggggggcggttttttttttggagcctgtctccttgaaatggatgatcatcgcgataatggcaggtttgattacggagtggttgtaatctgtggatgagtaatacttgcactggatgtatttttcattggttacatcgtcaatgtcgacgtcctcagtgccttcaacagtaagaactgattgttcgtcttggatttttaataggtgtaaaattgcatggtcgaactgatagaaataacccttgatagttgcgttggcggcccggttaaccattgttatgtcctattaaaatggtattgagattttttgggtcagatcattctcaatgatcaggtcaggcgaaaacgagacctgtattaggctttgttaatgccgaccttatagtctgcgttgcaggcagagtatctatgaccaaggtggcatagtgatagtacaccagacgtgattgtgcaagttttagctatcgtggaagccggtgttttgccttaggcaaagcgtgtacgcacagttcggagggcgctcccaagcgtgctctagaacgttgccacacaagctcggacccaaaacggtctctatctatgatctgttttaccaaggtaagaaatagaccgaaacagacggtcgtcaccgaaggccgtgatggccggtacaaaggaaaaggggaaaagggcggatttatttttctatcactgcccgctttcggtcgccagccttcattcatgaccggcagcccacttaaatcctcctcacaccacccccacctccacccccttagaccgccaaacaccccccaacaccatcaacaaccccaaccccgccatcgccgcccccgccagcgaaatcgccggataccccaaccccgcattaatcaccgcgccccccaacgccgcaccaatcgcgttcccaaaattaaatgccccaatattcaccgccgaagccaagttaggcgcgtccttggccgcttccataacccgcatctgcaacggcggcaccaatgcaaagctggcgatgccccagatcaggatggcgacggcggccggcagcggccagcgcatcagcacggtgaacgccagcaagaccaaaatcagcacgctcagcgagacgatcagggtgcggtctatggagcggtcggcggctttgccgccccacaggttgcccagtgtcagccctacgccgaacagcaccagcatggcggtgatgaaggcggtggaggcgtgggtttcgctgctgaggatgggggcgatgtaggtgaagacggtgaacatcgcgccggagccgacgacggtgagggccagtgcgcccagcaccgggccacggccgagtacgcgaatttcggccatcacaccgacgcttggcggcgccttgaggtcgggcagggcgaaccacaatgcggccatggccaccacgccgaggccggtaatgccccagaaggcggtgcgccagccgaacagttcgccaaaccaggcggccagcggcactccgccgatggttgcgagggtgaggcccatgaacatggccgccaccgcaccggcacgtttttccggggcgaccacgctggcggcgacgatggagccgacgccaaagaaggcgccgtggttgagtgaggtcaccaccctggcaatcatcaggctgtagtagtcggtcgccagggcggacatcaggttgcccagggtgaaaatcgccatgaggccgatcagcagatagcgccgggggattttgccggtggtcagggtcatcagcggcgcgccgagcagtacgccgagggcgtaggcacttaccagcaggcccgcagcaggaattgaaacgccgaggtccgcagcgatgcccggcaacatgcccatgggggcgaattcggtcacgccgatgccgaaggcaccgatggcgagtgcaacaaggggtggattgatacgcatgaaaggctccttatctatgccgccaatgctacgatctagccttttagggcggtagatagtgtttttggcaatcacctttgcgtaaggggcacaagtggacttcaacggtcgatcaggtgaaatgtttgtgttcgccaccgtggcgcaggaaggcagcctgtcggcggccgcccgtgcattggagctcacgccctcggcggtcagtcgaatcatcgcgcgtgccgaacagcgcctcggcacccggctgctgttgcgcaccacgcgggcgatcaccttcaccgccgagggcgaagcgtttctgcgcggcgcgcggcgcattttggccgacatggatgaagtcgaagaggccatcgccgaccagggcgtaccccgggggcgattgcgggtcagcgccgcccttggccatgggcgcatgtccatcgtgccgttggtggcggacttcagcgagcgctacccgaacatcgtcgttgacctcaccctgggcgacgaagtggtcgacatcctcagcggccaggccgacgtggcgatacgttttggctacctgcccgacagcccgctgaccgcgcgcagaatcggcgacaccggccaagtggtggtggcctcgcccgagtacctgcagcgccacggcaccccgcaggaacccgaagacctgctacggcacaactgccttcgcttcaacttccggcgcgccgaacccaactggccgtttgcgcgtgacggggaagaattttccctcaaggtcagcggcaacatcgaatgcagcagtggggaagcgctggcccagctggcgcgattgggcgccgggattgcgcgtatcggcgagttcaccgtcagcgaggacttgcggcggggcgagctgataccgctgttgcaagcctgcaaccccggcgaccgggagccgattcatgcggtgtttgtgggcggccccacgatgccggcgcgggtgcggttgtttgtggattttttggtggagcatcatcggatgtaggtggaggagtgggctggttctttcatgcgcgtaatcgtcacatcgcaagcagcgctagtcccagtccattttgatattttcttgttgccgaaaagcatccagtacgccgtgatactgcgacctgtcgaaggtcagagcgggtatcgcatcgaaccagtcgaccttgggcggttccacggtgactaaatctctcagcaagccaaatcgggtccactgaacttcatgttcatgagcgtattgttcggcaacaatcacggtacaggtcaggtccaggtcatctgagcagacgagcaaagggaccaaggtcttccatccaggtgcagtggaatagatcctatcccagataagcaaagtatcttcctcacagtacaaaccagagtgggcggcgacgaggtgaagctcggcatccgggttctgcatcggcagccatacttcaagaggtactccgtcaatggagaaagtcggatagaagccgctgctgtacttggatttatggctcgcgattgatagcaggttgatcattccattcctcggttcgctgaatttcacacaggctacttcttgcggttctgaatgtctgccgttggctagagatcagcgccctgatttctccgactgacaagcctgcgagcccgatggcggtgagactggggcaacgttttgtccctggcgcactgagccaggagcgctgtcagttcaacgttcagtggaaagccgcacgtgctggttgttctgcccctgttcaacctgcaggcgcgagtatgcgctcgcgcctgcaggcctgaaatcatactgaccgtgtcacttgatcaagtcgggccgggtggtcttgagcatcgccgcgctgaccgtgccttgaaccgagcaggtgatcatgcctttgctggtcttggccacctcttgggaagccggttctaccagcaatacccgttctgccgtatcggtcaccaatttgcctgcattgtcatcgccgttttccggtacccaggcagactgcttgtgcgaccagatttgcgcgcgggcgtaaatcccgttggcgctttccaggttgctgcccggtactttgttcaacgctgtgtaaagctcatcgggtgcctgctgtgtatagaacccccagccaatgatgcgcgagcccatcaggtcctggtcttcggcaaaaaagccggtcaacgcaacgccgtcgagggtcactggcgtgtcaaacatccagcgctgccccatgtcggttttggttccgccactcaaggtgatcttcccgttgtccagcgcactgggaatgcgctccttcagacctggctgattgaccacagcaaaagagttttcgtcacaggcgagaaatgtttgcagtgcaggcgtggcagcgaagctgctggtgcaagtaaccagcgcggcgaaagggatgaacaggtggttccatttcatagatttactcctagcgtcaaaacgatgagcgtctatacggcacagtgggaacaaacgagtcttggtgtgaaagatgacggcgtgaagccggtggtggaaggagcaggtttcctgttaaacagccagcggttgcccgtgcaggtcttgcagacttccagtcatcgccagtgtgtcggcaaggggcgtgaagacatgagtcagcgctctttgaaaggcttccatcactgcatgagtgagcaaaagaccataagggcttggcattcagggaaggtcgggcatcctggctacataagattcaacccaccatcagacagcaggatttcaccggtgagatagtccgatgcaaccagcatcgcaacggcttgggcaatgtcttccgggctggccgcccggcgcatcggtgaacgctctttccacagttgctgcgcctgagtccactctgcggtcagcggtgtatcgaccagccccggggcgacggcgttgacccggatgtcgggcgcaagtgaaacggcgagcagccgtgtcatatgattcaaggccgccttcgtcgcggaatagggaatcgatgcgcctttcgggcgaacgcccgcatgggagctgatgttgacgacgcagccgggtcggccggagcgtgccgaatcacgcaatgcggcttgcgcctcggcgatcaagcgaaagggcgcaatgacgttcacttcataaagttcatgccacacatcgggcgtcgcagccgccaagtcttcgtgaggaataacacggctgatgccggcgttattcaccagaacatccaaccgcccccaggcccctatggcttcgcggatcagtcgtgctctgtcttcatcaatagccaaatcagcttgcacataaatggccgacccgagttcgagcgccaggcgctgtccggcctctgccgaattgcgcgaatgcaatacgattgaatagccttcactggcaagccggcgggcaatggccacgccgatgcccgaagtcgagccggtaaccagtgcgacgggagcctgagtcatcatgtgagcctttaggggttaagggttttacgacactgcatgaccactgataccggttctgctcacggttgtgaaggcctgtttttggccgaaagcggccgactcatcacacacgagcgttcgtactgcctctcacccaaaacgaaaaaaccacccataccccagccgcgaagccgagatagggatggttttagccatcacttactgcgggaagttacctcaaaccccacccaccaacttcccgccctccatcctgcgtttataagcgctgtcccggctcgccaaccaaaaatacaacggcgacgtcaccaccagccccaccacccaggacaaatccgccccgttgatgtgtgccgaaatcggccccacatacagcggcgtgttcataaacggaatctgcaccgcaatcccaatggcatacgccagcagggcctgcgggttgtacttgccgtaaatcccgccatccacgcggaagatcgaggcaatgtcgtacttgcctttgtggatcgcatagaagtcgatcaggttgatcgccgtccacggcaccaggaccaccagcagcaccagcaccatgtcgacgaagtggccgatgaagtctttggaggcgaatacggcggcaatcgcacaggcggccaacaccaaggtcgagatcaccgcgcggcttttggcggtggggatccagcggtaggcgaaggtctggatcagggtgatgatcgagagcacggcgccgtagaggttcagggcgttgtggctgatcacgctgagcaggaagagcacgagcatcagcgggccgatggcgccggtggcgagtttgacggcgtccatggtgtccatgccgaccggggtggcgagcacggccacggcgccgaagatgaaggccaggctggagcccagcgccgagccgaggtaggtggtccagaaggtggacgcaaccggtacgtcggcgggcaggtagcgggagtagtcggacacgtagggggcgaaggcgatctgccaaagcgctgcgagtgaaaccgtcgccagccagccggagatgttgaattcgccgcgggtcaggaagtcggtggtttgtacgtgggtaaaaatgtagccgaagcccagcacgatgccggcgccgagcacccaggtgccgatgcggttgagcacgtggatgaagcggtagccgatgatgccgatgatgccggacccgatggcgccgatgacgatgccgaccggtacgggcacgctgtcgaccacgccgtgcagggatttgcccgccagcacgatgttggaggcgaagaaaccgatgtacatgacgccggcgatcaccaccaccagcaaagcgccgagggagccgaactgggcgcggctctggatcatttgcgggatgcccatttgcgggccttgggccgagtgcagcgccatcagcacgccgccgaccaggtggccgacgaggatggcgacaatgccccacagcaggttgaggtgaaacagttgcacgcccagcgcgccggtcacgatgggcaatggcgcgatgttgccgccgaaccacagggtgaacaggtctcttacctttccatggcggtcttcggggggcacgtagccgatcgtgtgtttttcaatcagcggggcggagggtgttgcagtggtaaccatgacgagctccaaggcaaggtgagtacgttgacgtacttcgctgtgcgccgcacgggcgggcgctttgttgttggagtgatcatctgcaatgggcgcagagaggtaaattagtaagtttgttgctatagaccttaaaaaatatagctcgcgcttgagcacgctccggtatgttgcctacgtgtgtttacgggcgaagtcccacgtttctggaggtcccgatggctgcctataacctgcgccagctcagatattttgtcaccacggccgaatgcggtagcgtcgccgaggcctcgcgcaagctgtatatcgcgcagccgtcggtctcgaccgcgatcaaacagctggaagacagctttggtgtgcagctgtttattcgccatcacgcccaaggggtttcactcacgccgagcggcgcgcggttttatcgcaaggccctggagctgttgcgggtggcccatgagtttgagcaaaacgccctggcggacaatgacgtggtggcggggcagatcgatatcggctgctttgaaaccgtggcgccgttgtatctaccgcgtttgatcgcggggttcaaggcgcggtggccgggggtggaaatccgtattcgtgatggcgagcagcaggaactggtgcaggcgctgacggcgggcagcattgatgtggcgatgctgtttgagcacgacctgggcggcaccatcgagaccacgccactgatgccgccgcaacagccgtatgcgttgttgccggcggaccaccggtttgcgcagcaggccaaggtgtcgctggcggacctggtgctggagccgatgatcttgctggatgtgctgccgagccggacgtacttcgtgagcatctttgaagagcgcgggctgacgccgaatattgtattcagctcgccatccatcgaaatggtgcgcgggatggtggggcgcgggttcgggttttcgatcctggtgaccaagccgtttaccgagtacacctatgatgggcagaaggtggtgtgtgtgccgttggcggagacagtgaccggttcaggcctgtctgccgtctggctgcgacgggcaccgctgaccaaaccggtccagctgtttgtggactactgccgcgaagaactcgccaggctcttgggctaacacagagccgcaatgtgggagctggcttgcctgcgatagcggagggcctgctggcctatgtaccggccgacccaccgccatcgcgggcaagcccggctcccacagggatcttcatgatctcgaaagactttctggcaaaacaccgagcaaaatgtgggagctggcttgcctgcgatagcggtgggcctgctggcctatgtaccggctgacccaccgccatcgcgggcaagcccggctcccacaaggacctcatgatctcgaaagaccttctggcaaaacaccgagcaaaatgtgggagctggcttgcctgcgatagcggcggccctgctggcctatctaccggctgacccaccgccatcgcgggcaagcccggctcccacagggatcgccctgaactcgaaagattccccggctgaacactgagcaaaatgtgggagctggcttgcctgcgatagcggtgggcctgctggcctatgtaccggctgacccaccgccatcgcgggcaagcccggctcccacaaggacctcatgatctcgaaagattccccggctgaacaccgagcaaaatgtgggagctggcttgcctgcgatggcggtgggcctgctgggctatgtaccggctgacccaccgccatcgcgggcaagcccggctcccacagggattttcctgatctcgaaagattatctggctgaacaccgagcaaaatgtgggagctggcttgcctgcgatggcggtgggcctgctgggctatgtaccggctgacccaccgccttcgcgagcaagcccgctcccacagttgatgtgtggtgtttgatcgattcaggcccggatggagtccagcatgcgctgcagcatggcatcgcagccatccagctgttcaacactcacaaactcatccggcttgtgcccctggtccatgctcccgggcccgcacaccacggtggggatgcccaccgcatcaaacaagccaccttcggtgccaaacgccacggtgccaaactcccgagaacccgagaacgcggcgatcaactcggccgcctggctacgctcatcagtgactaagccggggtaggctgataactcggtaaatttgatcgcactctgtgcgctgactgcctgcatgcgcggcagtactttctgctcggcgtaggcctttagctccgaagctacttcagtcggatcctgcgacggcaacgcgcgcacttcaaaatcaaaccggcaatccgccggcacgatgttcaatgctttaccgccactgatcacgccggtctgcaccgtactgaacggcggatcaaagcgcggatcctgcgtctcgcgcaggcgctggccaatgcggcccagttcgccgatcaggtcggcggcgtgttcgatggcattcaccccgtacggcgcataggccgagtggcaagcttcgccatgcacatcgcaacgcatcgccagtttgcccttgtggcccagcaccggcttgagttctgtgggttcgccgataatgcacagcatcggcttgacgggccgttgttccagcatcgccagcagtgaacgcacgccgaggcagccgacctcttcgtcatacgacagcgcaatgtgcacgggcatgcgcaagctggccttgaccagtgccggcaccagcgccagcacgcaggcgatgtagcctttcatatcggcggtgccccggccaaacagcttaccgtcgcgctcggtcagctcgaacggcggcaccgtccacggctggccgtccaccggcaccacgtcggtgtggcctgacaacgcaatgcccggcacgtccaccggaccaatgctggcgaagaggttggccttgctgcgctcgtcgttgtagatcaactcgctggccaccccgaaacccgccaggtactcgcgcacaaactcgatcaactgcaggttggattcgcggctggtggtgtcaaaccccaccagcgtttgcagcagttcgcggctgctgctcatcggtcatctccggccacgccgtagccgggggagcggtcgggggcgagggcgcggtcgatgtagtcctgcacttgcggacggtaagcgtcccagagtttttgcagctcggcgatgggctgctcatcggcccagtccacgcgcagattgatgatcggccaggtcagttcgcccaccaccgtcaaggcggcggaatgcaccgggccggcttcgccaccggcggcgatggcggcgtgcatggcggccatcaggcggtcggccaactggccttcgccgtgttcgaaggcctcgaccatcgcctcgatcacggcgcggtcggcgagcatgttgcccgccgccacgcattgctcgcccgacactgcgttgtgggtgccgagggtttcgctgccgctgaagtgcacgctgcggcccaggtgatcaatcgccgtgagttgccggtattggctatagccgttgctcgtcagggccttgtcgacggcctcggccggggcaaggccttgttccagcaaatccagtacatcggggccgagggcgggcagggtgatgttctgggtcgacaccgcgcccacaccggggcgcaaccaagggcagcgggcgcccacggcgatgctcgacgagctgatggcgatgcccagttggccggtgtcggcgcaacgggcgacgatggaaaaggtcatggtggcgctccttattcgggaatgacggcgatcacatcaatttccatcagccactgtggctggcccagcgccgacaccaccagcccggtggaaatcgggaacacgcctttgagccacttgccgacttcctggtacaccggctcgcggtagcgcgggtcgatcaggtaggtggtggtcttgacgatgtggctcaggtcggagccggcttcttccagcagttgcttgacgtttttcatcgcctgctcggcctgggcgcgcgggtcgccgaggccgatcaggttgccctcaaagtcggtgcccacctggccgcgcacgtacacggtgttgccggcacgcacggcctggcacaggtcgttgtccaggctctggttggggtaggtttccttggtgttgaacatgcggatgcgagtgtgggtaggcatcaaaaaaactccggacaataggtgatcaggcaatgacaggcgaggtgtgaacaaccggtgcggcttcacggtattcaaggtattggcgctggatggcgatgtggtcggccacgtatttggcgtcgtgccacacgccccagataaacgacgagccccggcgtgactgccacggcaagccgaggaagtagatacccgcttcgctggccacgccgcgctggtgctgcggcttgccggcggcgtcgaaggcgtcgaccttgagccagctgtagtccacggagaagccggtggcccagatgatcgaggtgatgccggcctctgcgaggtcgagttccaggatcgggttcttgatgcactcggcgtccgggaatacgcggcgggcttcgggctccggcggcaggtcgaggccgttgcgctcgatataggcgtcggcggcgtccagcaaggtcaggtagttctcgtcgccgcgcgccaggttgtccaccaggttggcctggaacgtggcggtggtgccgttgaaagcctgggtcaggccgaccagggtcatgccttgctgggccagctcacgaaaatcgatggtcttgccgccgtgggcgccgctcacggcgatggtcacgtgctcgcggccgggtttcatcgcggcctggtcccactcgcccagcacgccgagccaccagcagaaatcacggttgcgataggcgcggggcgggcggtcgtgggcgccgaccgacaggtacacctggcgcccggagcgttgcagttcatcggcaatctgtacgccggaagaaccagcgcccaccaccagcacggcgccggcgggcagctgcgcggggttgcggtagtcggcagagtggatctggtgcagcgcggtgtctgtgggcgcgatggccggaatcaccggtttctggaatggcccggtggcggcgaccacgcggttggcttcgatcacgccttcgctggtgtgcacggtgaagcctgggcggccgatgttgcgcaccacggaggtcacgtccacgccggtgcggatcggcgcgttgaatttgcgggcataggcttcgaagtagtccgcgacgcgttctttgggggcgaagccatcggcggcgacgtcatcgaattccaggccggggaaacggtcatgccaggccggcccgttggccaccagcgaatcccagcgcccggtgcgccagcgctcggcaatacggctgcgctctagcacgatgtgtggcacgccttgcttgctcaggtgctcgctcatggccaccccggcctggccggcgccgaccaccagcgtgtctgtttttgttatggcttgagtcatgtctctgtccttgcgtaatgcagttggattcagcttgggcatggcttcaaggctagggggagggcggtttttaataaaatattattaagctgggaagtgagcataaatatcggatgcagagcttgtgggagctggcttgcctgcgattgccatttcacggccgatggagtcttatctgacccaccgccattgcgggcaagcccgctcccacatttggaccttcaccatgccgacgattcgggttatgacccccgccgactacgacgccgtgcttgccctgatgcacagcacgcccggcatttccctgcgcgatgcggattcgcgcgaagccaccgagcgctatctggtgcgtaatcctgacctgagtttcgtcgccgaagccgaaggccggttgatcgcctgtgtgatgtgcggccatgatgggcgccgagggtatttgcagcatgttctggtgctgccggactatcgccgccaaggcatcgcccaagccctggtcgagcgttgcctcgctgcgctggaacacctgggcatccacaaatgccacctcgacgtattcaagaccaacaccagtgcagccagctattggcagggacagggttggaagctaagaacggatatcgaccggtattcatttacccgcgagggcaatgaaaacgcgtgaacgcccccggcccctgtgggagctggcttgcctgcgaaggcggcggcactgccggcaaagctgtcacatgaatcacagccgcccacaaccgaacgcgatcagctcaaaaaatccgtgcgcaggcgctggatgacctggctgatcgacgggccctgaacgtcgggcgtcaccgggttttccccaaactcgcgccacacaaacagcgtcagctcagccccatcagtcagagacttacccgcctcctgcagcccaaacccttgcagcacccgataacgctcgtcccgccaaaatgcctcttcaacccagccatacaccggaatgaaatgaaagtgcagcgggaagcccggcatgtgcccgtagcggctgatgtacagccacttggggttgagctgcgcctccatgacgcgctgcactttggcgagcaaaccgcccaactctgccaatgccgcctccggcatatccgccaatgaatggattggtgccctggcccccagcatcaggtaacccggcagcttcgacgcctggtgatggttgagccgccagtgctcggtttcatacacgataaaagccggatcaatctgcacaagtgtgtccatgtgggcgggatgggcaggttagcaagcacgtcagcgcttgcgatacaccccacccaactcccgcgccagcccgatgaagttttgcaacggtgccgacgggttgaatgtgcgccgcaccagcgtaatcggcgccagcagcttgggccgggcgtctttgattcggcaatacaccacgctttcgcggtgcacgtcgcgcatcgacgcgggcaccactgagatgccttcaccggcggcgaccaggctgacgttggtcagcatgcgttccacttcaaaggcgattttcggctcgaaaccggcgttctggcaggccttgatcaggttggcgtacatgcccggcgcgccggggcggcgcacgaggatgaagcgttcgtccctgagggcggcgagtggaatggccgcgccgttcaacaatggatggccggtgggcagggcgagcagcatttcttcgttgagcaggcggtggaaggtcaggctttggtgggtgctgacgggcgcgcgcagaatgccgatgtcgatgcgcttttcaatggtgtcctcagtgacttcgcgggcgctgccttcgttgatcgacagttccacgccggggaagcgctcgcggtaggcgcggatgatgcgcgggatcaacgggtgggcggcggcggagctggtgaaggccaccaccagcgtgccctcgataccctgggcggcgcgcgaggccttgagcgaaccctgttcgacgcgggcgaggatcacccgggcttcgtcaagaaacaccaggccgccggcggtgaggtccacgcccttggggtggcgcttgaacaggtcaaaacccagctcggtttccagcgcacgaatctgttggctcaagggcggttgctgcatgttcaggcgcgcggcggcacgggtgaaatgtcgctcttcagccaccatgatgaaatagcgtaaatggcgaagttccatggtggtatatcccgtggcaagactttattatttgcggcctgcagcggccaggcggtcaatatgcccaacgcggtgaataacgacaataacaataaataaaaacacgctggagtcacgatgccgagccgatacgccaagaatggaaccctgcctatcttgattgccatcgcactgggcatgacattgggtttggtatttcccgacctggcaatcgaaatgaaactgctcagcgacgggtttataaagttggtcggtgtgttaatgccgttcctgctgtttgtactggtgtccaccggtgtggccggtatcaagcgcgagccccaccatcggcatgtggtgcggcgcattattgtttatttccaactgatgtcctgcgcggcgctggtggcgggcatggcgaccggctgggtgttcaacctggaacacagcgcgttgcccgcaccgccgttgcccacgggcggttttctgcacgagttgtcgctgttgtctgcgtcttcgacgctttatcacgtctttacccaaagcctggtgctgcaggtgatgtttgccgcggtcatttgcggcgtgctgctggggcgtgggagccgcgcagggaatcgctgcctgggctggctggaagcgggggttcaggggttgttttatgtgctgcggatagtgttgaagtttgcgccgctggcggcgtttggtgcgatggcgtttgtggtgggtaaatacggagtggcctcggtattgcccttgctcaagtttgtagtggttatttatttggccagtgcgttatttgtgattttagtgttcgccgctatcacgcgctgggccggtgtgaggttatctcgcctgattgtttatttgaaagaagagttgttgttggtgacatttaccggttcttctgtcgctgcacttccaggctgcgtgaataaacttgaggcgctgggctgtgatcggcaattagtgcgcctggtgttgaccaccggctacaccttcaacctggcgggtaccaacctgtacctgaccacggccatcatgtttctggcgcagttggcgggcgtcgagatgaacatgacgcagttgctcgcggtactgggagtgtgcctgatcacctcgttgagctccaccagtgtggcgggttcggcgctgttcacgctgattgccacgttgaacatcctgcaatgggtgccgctggaaggggtggggttgttgctcggcgtcgagcgtttgatgaagtgccggtcgttgaccaacgtgctgggtaattgcgtggcgtgcctggcgatttgcgggtggcaacggtcgattgatcgtgaggtgctgcggcgggaattggtcacttgaattgaacacaaatcctctgtgggagctggcttgcctgcgattgcagtgtgacagccgccgaagatatcgactgaaccgccgctatcgcaggcaagccagctcccacacaagccagctcccacagttggattgcatttcagtttttggagtcggccagcttgtcgaatgccttgtccaggttgccctcggcgctttgcagcttttcacgccgctctttcagccattgctgatccccctccagcgtcttgcgtgcctccaccagcatgcgcttgacctcctgcggctgcgggccgccggtgcctttgcgggtttgcaccatgatggtcggcgatagagaggcacggaaacctgcctcatccagcggcagggtattgggcgtccacttgtacttgtccgccgcttggctatacagcttctgcgcgtctgcataggggaaggttttcggcgtggtgccgttgctgcgtgcttcggtgacgatcagcgaggcaaagctgtggccaatgcggaacggcactttgtattggcgctccagggtgtcggccaattccatcgacgtggtccactccgattccagttcttccaaagagcgctgcgggttgatctgcaacgcgtcgagcactgcgtccgtggcgtcgaacatctctttggtggagcggaacacgcccagggagtcgaaggcgaacttgtagtcggtcatgccggtggtgacgttgtgcgcacgcagggtcacggcctgggccaggccaaccacgtccgaggcgctctcacgcgcgcgcatcagcaggcccgggttgcgcttttgcggcatggcgctgctggtgtaagtcgcctcttcatccagcaacaaccaggggcggatctggtgatactgggtgtggatgtcgccgatcatcgcgcctacgcgaatggccgatgaggacgccaggttggccgcttcgattggaatgtcgtaggtcgatacctggctcgaatccagcgagttctcgcgcacgccatcaaagcccagcagttcggccaggcgctcgcggttcagcgggtacgccgagttcgccagcacggcagtgcccatcgggctctggttcaggcgcgtgtacagctcgcggatgcgctggccgtcgcggtcaaacgcggcttcaaaggccagcaggtaatgcgcgtagctgatcggcatggcctgcacgccgttggtgtaggcgggcaccagggtgtcgacgtttttgtcggcgaggttcagcaaacgcaggcgcgtggcattgagcgcttcgctgtaagccaacacttggctgcgcaacgccgcgaggcgataggtggcgagcatgtcctggcggctgcggccggagtggatcagcgaggcttcgggaccgattttgtcggtcatgattttttccagttgcagcacatcgctggggcgcgtgccgccgggctggtcggcctgggcaatggcgtaacgtacgccgccggcgatcttggagcccatctgcggcttgacgatgccttcttcggtgagcatcacgatcgaggctttgttgatgcggttcagccaggcgaattgagtctgggtcgggtcgcccttggccttgtgttcggtttgtgagctgtcgggggtggcgccgactttcgctgcctgggctgcgcattgctcggtggtggtgcaaggcagttcgcctgtgttggccgcgtgggccgccacgctgttgaagagggcgaaggccacggccagatgaagcaggcttttaagggcgcgaggggatgtgttcacaggaatacccgattatttttggaattgtgagccgtcgtcgcaagtaggcgtgcgcggtggaatcaggctatcgggtctgtttgcagattgaaaatatatagtaagtgtcgatggcagagcttttgaatatggcgcgcaaaggctttgaagcgtttcttcataatgcttgtgctataccgtggtttttgtgtggagtcaggcatgcgccaggatcagctcgacggcttggtggcctttgtgtgtgtcgctgaacacgccagcttctcggccgccgctgtgcgtctgggggtttcgccgtcggcggtcagccaagtgattcgcaacctggaacggcgcctcggggtcgcgctattcaaccgcaccacgcgcagtgtcagcctgaccgaatcgggggtggggtttctcgccaaggtgcagccggcggtgaacgtgctgaccgcagcggccttggaggtcggcgacagcagcggcctgccgtccgggctgttgcgtctgaacgtgccgcgcgccgcttacctgacggtgctgcagcctttattgtcggcgtttcttgccgcacacccgcaaatcgatttggagctgaccctggaaaacgccctggtggacatcgtgcgcctgggctttgacgcaggcatccgctttggtgatttcgtcgagcaggacatggtggcggtcaaggtcgggccgacgttgcgcatgcgcgtgatcgcatcccccgagtacctggcgcgacacggcacgcctgcgcatcccggggaattgctgcagcacaactgcatcgcctttcgcgcctccagtggggtagtggagcgctgggagttggccaggggctaggaaacgctggcattgccggtgagcgggcggatgatcgtcaacgactcatcggcactggtgcagagcgtgctggacggtttgggcatgggctacatgatcagcgggcatatcgacccgtttatcgcgcggggcgagttggtcagcctgtttgaggcgtggtgcccggagctgccgggatacaccttgtattacccggaccggcgacgggtcagccgcaagttgcgcgcgctgattgatttcctgcgggagccgccggtggtttcagtaagcccactgcgcgttctgtgaaccggcttgttgtggtgagcgggctcaccacaacaagcccgcccgattgcccttagtgcatcttgctgtggtccatcccatccagcccacgggccggggcctggatgtcgatcgactgcttctcgcccttggcgttttccaccgtcagggtcagcggcacctggtctccttccttgatctgccgggtcaggcccatcagcatcacgtggtagccgttcgggtcgagggtcacggctttgccggcgggcagggccaccgagtccaccgggcccatgcgcatcacgtcgtccttcatgctcatctcatgaatctgcacgtccttggccaccggcgaggccacgctcagcagtttgctgtcggtgtcggcggtgacggtcatgaacgcgccgctggacggctggcccggcaccgaggcgcgcacccaggcgtcggtcacttgcacctgggcactggcgtgggcggcgaggcccagcagggtcatgccgagcagggcgcgcttgaggtgttgaacggcagtcatcagcagacctccatgacggtgagcaggtcttctgcgcactcttttgcggtaagggaagcctggaggcccaggcgcaggttgccacgggtgtcgaacacaaagctggtggcggtgtgggacagggtataggtgtcaccggcggggatcttttcataaaagatcccgaactccttggcggccacggcgatttcttccggggtgccgtacagcgcctggaagctggggtcgaaggccttgacgtattggtcgaggatttgcggggtatcgcgctcggggtcgagggtgatgaacaccacctgcatgatcttgccgtcgcggcccatcagcttcttggcctgggcggcgcgcgccagggtggtggggcacaccgcagggcattgggtaaaaccgaagaacaccaccggcatcaagccgcggtacgagctcaaggtgacggtttcgccggcggtgttcttgagcttgaaggtgcggcccatgatcttgtcactgaggtccttgccgtacttgaagttcagcttggggctgtagtcacagccgcccagcaggctgcccaggcccagcaggcccataccggtcagcactttgcggcgggtgaataacgtactcatcaactgtgcatcctgtgaaacgcctgcagcgttctgattcaacccggcaggctttgaaaggagtagcgaggaaggcgccaagtctaccaaccctggccggcccgcgtaatctgcgacgttctgccacaggggcgcgccgcgcttcatcccggcgggccttcggtggtagagtcgccgccatgaaattaagccactccgaccgtgcactgatcgcctgggccctgtacttctgcgtgctgatgaacgtgttcgtctgcggtttggggcatggccagatgatgggcttgcagctcaatggcatcggcggccagttctgttccgtcgagggcggccagctgccactttccgacaaagggttggcgaacccgtcttccagcaacatctcgaactactttgcctgcccgatgtgcaacgccgtcacgctggcgatcgtctttctgattggcctcgcgtggctgctcggtgtcgggcaagccccgcgcccggcccatgagcggcgcaacaaagcgccgccgcgctattcctggccctcggccaacccccgcgcatctcccgccttctgacgtgtgccctgggcttcctgtttacaggaggcattccatcgtcatgactgtgagtgcgtttcatgaatcatgcagtgcctgcaggcgccagccgcctggtcagcaaggcttcccgtcgcctgcgcgcggagccagtgccggccgagtacccgagtaattcccgctgtttcgtgcacctggatgcacgcctgttgccccattggcacagcctgttcgacatctgcccggcgctgctcaagctcgacccgcccgaggggttgaacctgtttcgcagcttcatgacctgggcctaccgcaaccagccccccctggattggacgtatcacctgaacgtgtgtcgatggctgctcgcctcgccctatcgcgtgcagatagacgacgagcctatcgaggccttcatggcggctgcggcggcctgttgggtgaacggcgatgacagccaggccgggggcgtggtcgtggcctggcaagggacaaaggtgttcgattggaaggtggccggtgcagacgaacaccaggcgctaccggttgccccctgggatttcgcctggtgcccgttgagcgcccgaggtgaattcagcggttggttgccggtgccgtgaggtgttggcgaatccagcttttgacgtcggtcacggcgatctgctgctgagcgttgaacgtgacggcggggtcccaggccacgccgttaccctgggcgaatactgcgcggtatttctgcaggttgtcctccgggtttttggccaggtccgccagcaatgtcggtactggccagggctcgcggatgagcgtggtgccgagggcttcgtcgacggtatccgccagttgcccgtaggtcagggtgtcgccggcggtgaataccacctgattggtgatggcgggctcagtcagcacgatgcgcgccgtcagccggccaatatcctcaggcgtggtgaccgtgacggcagtgtcccaactgcccaaggcatgcactgtgttgtgcgccagatccaccacaccgaatgaaggctcgaacagaaagctggtgaacatccccgtggagatgatcagccattgcgtgccgtgctggccgcgcagcaggtcgcgcacatccagttgttcatcgaatgaatcctgcgggctgcctcggccgatcacgtcgtaatccacaccgaattgccacggcacatagcgctgcacaccgccctcgatggcggcccgtgcaagtttgcgctgggtgccggggccggcggcaaaaccggtgcagcagatcacggtggtgaagggcgcgaagagtgtggcgagggtgctttggctgtcgtgctgcaagtcgccgggcagcacctcgatacccaacgcacgcaaggtgtcggcggcctccgattgcaggcgggaggggcgcagcagtacggcaatgcgcgttttgttcgttgtggcctgtgccgcgagtgcttgcagcacagccatgcccagttcaccggcgccgagtaccagaatggaaggggttgtcatctgcttttccgtctgtgttgaaagtcgtggcatgcttgcagaattaatcggcgcgcataagaaggcacaccagtgataccgggagtacgcaatggataacgacgaaatcatccggcgttcgcaagcggcgtgcgactcgctgagcgcggacgatgacggcctcaagcgcgaggtgctgacccacgccggcaaccgctggtcactgggcatcgtgcatgtactgggggtgaacgggcgcctgcgtcatgccgagattggccggcgcatgcaaggcgtcacgcaacgcatgctgacccgcaccttgcgccagctcgagcgcgatggtctggtgctgcgccacgacttcgaggaagtgccgcccagagtcgaatacgagctatcggcgctgggcacgcagttgctggtcaacatgttcccgctgtggaattgggtggtggaaaacgccgacgatttccgtcaggcgcgtgcacgatttgacgcaatcacaccaccgtaatccctcaactgtcggtgcgcggtttgctctttttcggctttttctggctcggctgctgcttgcctgaggcgcccgacgcagcagccttttccttgggctgtgtctcggcctttttgtcgccatcggccgggctgctggggtaggtcccgggaggcaaggctgagcctggaacgctgttgccactcagggcactgggggcgacggcgtcgccgaatgcggcgtgggcggggccggccagcagggctgacaagccaatgataagcacaatccttcgggtcacattggtcttcatgacgcaatctcctgtcgcggggacggacgatcaggcagagccaatacaggggcctgcctaattgggagtgcgcgcaggaaaccaaagtttgaacgggttcgcgccaacacgacgagcggccaccctggcaaattttaatgaaccctcgcgcccttgccttgacctaatgtctacgacctcaggaggtgaatcatgcaaatacactatgtctggatcggtttggcggtgattctgctgctctttgagctatgggcgatcaatgtcgtattacgcagtaccggtggctgggagaccaagggactgtggctgatcattctgatttttgtgccgctgttcgggctgatcgcctgggccatgttcgggccaaaacgcgagatggcggatagtcgcagaggctgaaaaaaccagataaaaaaacaggcgcccgggggcgcctgttttcgttttgcgttatcacttcaacccgcgacagcctttgcaactgccgcattgaacgccggcaaatcgtccggtgtgcgagaggtgatcagggtccagccattggccttgcactccttgacctcggcatcgacccacgcggccgcaccagcattgaccaggtcggtgcgcacgcttttgtacgaggtcagggtcttgccctcaatcacccccgcatcaatcaacgcccacggtccgtggcaaatggcggccacggttttaccggcgttgacgaactcattgatcagcttcagcgctgccgcgtcctggcgcagggtgtcggcattgacggtgccgccgggaataaccagtgcgtcgaagtcggcaccggacacgtcagacattgcagcgtccgactctaccgttttgtccttttcggtgtcgcccacgaatgtctgtgtagtgccgcctttgctggaagcgtgggtcacggtcgcgccatagccgcgcagtgcctccagtggtttgaccaactcgtcgcgttcgataccggtgttggacgtgatgacgaggattttcttgccgttgagttgcgaactcatggttgggtgtctccttaagtcaggatgagatgaggggtcgtacttggctggccacgccttggccattttcaggtgggcttcaaggggtggcagcgtttcggtggcgaaggctttcagctcggcgttttccgaggaggcggcttctttatcagccgcgtattgatggtgtcgctccttgaaagcggcgtgatgccgttacctgactgttgagggggtatggatcgaaaaggtttaaattaattcgtgcttatttctccggcgggcacggggcgaatttccttgaactatcgaaattcggcgggctctgctgctttagcgcccgctatttttttgcgggtttcaattgcctggagccagaccatgacgaatcacaaaacgcctgataaaaccccggaacccatcagctctgaagacgcgcaaaaaggcatcgagaaggcctccaaggggcaaacccttgagcaggcgaaccccaggactgaaaccgtcgacaaagtgctgacacctacgtcgatcaaagaaacgcagcgccagaccgacgcgatcaacgagcaagccgccaaggctgagcgcaagctggggcactgaacatggcccggtctatcacagcgtctgaattgggtatcacgctcaagcctctggatgacgccagcctgttcaagtggtttcttgccagcttcctgatgggcaagcgtattcaggcgccgattgccgcgcaggcttatcgggtgatagtcgaagaagagggccgcgacaccgcgcgtaaggtgcaacattgcaccgcgcgcgagctggtcgcgatgctgggccgagcgcattacgtgcgctatgacgaaaccacggcgcagcgcctgcttgatctcagtgccaagttgaatgccgagtacgcgggcaagatcacgcacatgcgtgacgccagcgaaggccgccaggattttgaaaaacgccttggcgaatttgacggtgtaggccctaaaaccatcgagatcttcatgcgtgatgcggcagcggtgctgttttgagtgcgttgctgtatgtcgggtgtgcgggttggagcttgccgcgtgagcagtggccggctttcacccgggaagggactcacttgcaacgctacgcctcgcgtttgaacgcagttgaaatcaatagctcgttctatcgcccgcaccagccgaaaacctatggacgctgggcgcagtcggtaccgacggcgtttcgtttttcaatcaaattgcccaggctcatcacccacgagcggcgtttgcaggcgtgtgaaatggcactcgatgaattctttgagcaatgcttgccgctgcaggaaaaactgggctgcctgctggtccagcttcccccgtcctttggctttgaacccgctgtcgcagcgtctttctttggagcattgcgccaacgttttgcaggcgcagtggtacttgagccccgccatgccagttggttgaaggcagaggctgttttgcaagacttccaggtagggcgtgtggcggctgacccgcacgtgctcgaaggcgccgatatgcctgctggctggcaaggtgtgcgctattggcgcttgcatggatcgccgcgtatttaccacagcgcctacggtcccgagcgcgtgcgggctttcgcgcaagtgctgcagtcgtccattgaagacggtgttcccacctggtgcattttcgataacaccgccagtggccatgcgatcgccgatgcactgttgttaataaccctcgacgcgcaggacttccagacctagctgttcatacccctcgacactcggcacatgccactcggtaatcaacgtgtggatgcgctcgcacggtgccaccacgaaaggctccaccgcccccagcttgtcggccatggtcacggccaccacgtgggacgcgctgtcgagcaaggcgagcttgaccgccacttcatcgaagtgcagcgaggtaatgccaatttgcggatgcaaggcgcacaccccggtaaacagcaggtcggccttgacgctctggatcaggcgtatggcttcctggccgcccgtggacaatgtggccgggttgagttggccgccggccagtatcactttcacatgggggtggtcggccagggcgatggcgatcatcggcgaggcggtgacgacggtcaggtggatctcgcgtggcagggattgagcgatttgcagtgtggtggagccagagtcgaataacacgatctggccgtcctccacacggtcggcggccaattgcgcaaggtggcgcttggtgtcgtttgtttcgccgacgcgggtgaagaaatccttgccggtgtctttgggccggggcagggcgccgccgtgcacacgctgcaacaaaccggcgtctgccagctcgccgaggtcgcggcggatggtgtcctgggacaccgcaaaatgctcgaccaattccgaggcggtgactttgccgtcacgttccagcagcaacaggattttttgtttgcgcagcgaaggcaggtcgatggcttgatgggtgttgtgcatgtttgtgcgtctttttgcgggtttgtgcgagattattccgccgtctgattaaatgcaatggctggttgcgcggccgatgggcggttactctctgccatcagttcagggagaggtgacccccgatgtcgttgatcacaaccatcgaagatttacgcaaactcgcgcaaaaacgtgtcccacggatgttttacgattacgccgattccggttcctggactgaaagcacctaccgggccaatgaaagcgattttgcgagcatcaaattccgccagcgcgtggcgcgcaatatcgatgagcgctccattcgcgcccgcatgcttggccaggacatggccatgcccgtggcgctggcgccgaccgggttggccggtatgcaacacgccgacggcgagattctcaccgcccgtgccgctgccgcgtttggcctgcgctacaccttgtcgaccatgagcatctgctccctggaagatatcgccgagcaggttggccagccgttctggttccagctgtatgtgatgcgcgaccgcgcatttatcgagcagttgatcgagcgtgcaaaagccgccggggtggatgccctggtgctgacgctggacttgcagattctcgggcaacgccacaaagacttgatcaacggcctgtcggcgccgccgaaactgaccctgccgaacatcctcaatatggccaccaaaccgcgctgggtgatgggcatgctcggcaccaagcgccgtgggttcggcaatatcgtcgggcacgtcaagggcgtggcggacatgagttcgctgtcgtcgtggaccgcccagcagttcgacccgcgcctgagttgggatgacgtggagtggatcaagaaatgctggggcggcaagctgatcatcaagggcatcctcgatgtggaagacgcacgcctggccgccaattccggcgccgatgcgttggtggtgagcaaccacggcggccgtcagctggatggcgcaccgtcgagcatcagccaactgccggcaatcgtcgaggcggtaggtgagcgcatagaggtgtggctcgatggcggcatccgttccggccaggacgtgctcaaggcggtggcactgggcgccaaaggcacgatgatcggccggccgcatttgtacggcttgggcgccctgggtgaagccggcgtgaccaaggcgctggagattattgcccgcgaactggacgtgtcgatggcgctgtgtggctataacgatatacgcgatgtgaatcgcgatattttgctgccgggcacctttcccacaggtgtttactgagcaaaaaaaacgtaaaaaagtaaaaagagttgtccacgaaaaccgtgggtatctctgtggataactttgcgagaccccggcaggtatggcgatttaacctgcggttaatatttgatcaactttcggcgcgggccagtatgggcagggtttgcgcttgacagccaagtgcgaacccagtgccgaaaagtacttttacgagtcgccgttacggcctgtggagtgcgtgaccacctgtgcaggcaccttcgtacgcatcaaattatccagcgcctggccatagctgcgaccggccaggctcatgctgttgttatgggttgcgccgggcaccaataacaggcgcttgggttcctgagccgcttcaaacaattgctggctgaaacgcggtggcacgtattggtcggccaggccatggaccaccagcagtggcatgtgcacatcggccatcttgtcgatggaatcgaacttctgcgacagcagccagcgcaccggcaatgaggtattggccacggcagtggcggcatcgccgagcgaggtaaacgtggattcgatcaccagcccgcgcacgggaaccggcgtttgcctgctcagttcgacggccaggtcgatcgccaccgcgccgcccagcgaatgcccatagatcaggcgcttttcggggtcgggttgcagcacctggaagcgttcccaggcaatgcgtgcatcctgatacaccgtggtttccgagggcaaatccccgtggctttggccaaagccgcgatagtcgatggccagtaccgaatagcccagcgcgtgcaattgttcgatgcgaaaaaactgcccggtgaggttccagcgcacgccatgcaggtagaggatggcgggggcgtctttcttgtccgccgggtaccaccaggcatggatgttctgcccggccttgaaactggcgggcttgagatcaaattcctgcaccgcctttggcaagccgttgtaccaactggccgtgcccggttcgatgcgaaacaccagctcgcgctccttgtgctgcagcacggcgcagcccaccggcaggccgacgatcagaatggccatgcacagcaggggaaaccagcgcaggcccaggcgagacaaaaagcgtgatgacatgaaggttccaggacgaaggtgaagcaggggttttaccagatggcctgcgggggcaggaattaattcgacggccgcccacgggtatctcttgcaaagtgttgcagcgctgctcccttgacgctggtatcgcctgcgcgacatgctccagctcctttgagcaaaggcccgaccatggacaacagccccgttcgcatcaccgccgaagagaccctttcggaaaactggtacctcttgaaaaaatacagctttgacctgcgtcgccaggatggcagctggcaagctcagacccgtgaggtgtacgaccggggtaatggcgcgaccattctgttgtacaaccgggcccgccgcaccgtgttgctgatccgtcagttccgcatgccgacgttcgtcaatgactaccacggctacctgattgaaaccgctgcgggtttgctggacaacgcaagccccgaagaacgcatccgtctggaggccgaagaagagaccggctaccgcgtcggccatgtggaaaaaatctacgcggcgttcatgagcccgggctcggtgactgagcgcattcacttctttatcggcgaataccagccgggcgaccgggtgggtaaaggcggtggcctggaggaagagggtgaggacattgaagtgctggagctgggctttgagcaggcgctggcaatggtgcacagcggtgacattgtcgacggcaaaaccatcatgctgttgcagcacctggagctgcgcatgttgaaagaaggctggtgacccgtgaggcgctggtgtgcgttgctgtgtgtattgattgcgggcggtagccacgcggccgacgcgttttatacctgggccgatccgctgcccggcgaaccggggcggttgttgcgcagcgaagcgttgacgccgcagcagagcctggctgacgccgcgcagaacctgcggatcctgtacagctccaccgacggcctggataaccacacgcccatcaccgtgtccggtgcgttgtttctgcccaaaggcaccgcacccgcaggcggctggccgctgatggcctgggcccatggtacggtcggcagtgctgaccgttgcgcgccatcgctgaatgcgcgcagccctcgggacacgcgctacctcaattactggctgggccagggctacgcgattgtggctaccgactatcaaggcttgggcacgcccgggctgcatccttatgggctcacaaggccgctggcgtatggcgtgctggacagcattcgcgcggtgggcggggcggggttcaatgtgtccaaacctgtggtggtgttcgggcaatcccagggtgggcgggcggcgttcgccacggcggtctcggccaaggcttacgcgccggatgtgaatatcgtcggcgtggtagccacgggtacgccttacgcctctgcgcacccccaaggtaaaagcgccgagctggataatgcccgtcgctcggtggtgccgacctttgcctacaacctgttgcgcctgagtacggccagcttgcttgatccttctttcgtgcccaccgactaccttgccgaccaggcgttgccggctttcaaaagcagccaggaagattgcctgcatgctatcgagcagcgtgtggtggcggatgggctgaccttcaacaacagcttcaagcggtcgtccaaggctgcgctggatcaggttaatcggcaatcggcgtatcccacgttgaaaaccgatattccagtgtttctcggtacgggtggcaaggacctggatgtgtttgtgccggggcagaaggcgttggtccgggatgcgtgcaaggcgggggaccggattgaatggcatttttacccggagctggatcattcggggacggtgaatggctcgcttggggattcgagcgggtttgtgcgcagggcgtttgccggggaggggattggagggaattgtcgggagtgagtacatatccgttatttggggcgctgcggatatgggttccgcccttacggcgggtcactttggaaaagccccaaagtaaccaaagggctcttgccccaccactcggcacctcgcttaggctcggtgtgcccgcacgcaggcttgaatccgtgggccgccgccatgggccatccctggcccatcgcggctaacccggcgtcctgccgggttgcccacggattcaagcctgcgtgcggccagcgtggtttaacggggcgcctgagatcaagatcaagatcaaaatcaaaagcaagagcacggcggcctgacagccggcctgagtggttgaatcaaaagcgctgtttttgctagagcagaccgcgttccccgagacaaaatggagatctaattgtgggagcgggcttgctcgcgaatgcggtgggtcagccaatgaatctatcaactgacacactgcattcgcgagcaagcccgctcccacattttttgaccgagttcggctctgtttttctgtgggagattctatggttggggagcaaccctcaaccaaccttcggttggtattcgttttgccctttcagcaaggcaaataccacccgagcaagcttgcgagccaacattaccagtacctgagtggtgctatatccccgtgcccgctgcgtctggtaaaactctgtccatgctgcagtccggctagccgccattgctgcgttatgcagaagacgccgcgcttctgagtcgccgcgcttgcttaaactgcgccgattatctttctgcccggacttggagacgcgcaagtccatacccaagaaagcgataaatgcgtccgcatttctaaagtcacctcgctggaagctggtaatcaagcgggccccggtcaaaaagccgataccttcaacgctcatgcaacgtttgagttggcccagtaacccagcctctttcagtcgatcgctgatcattttttcgatcagtccttcaagtctttgcatcgacttcatttgctcggcaaaagaggccttcaacagcggttcattcgcccagctttgcgtcaggctgacgcgagcttgaaccagggcggcacggcggcggaaaaggctcaacagttggcgataaagaggggacggcggtgtccaggggcgaagctcgtcggcttcttttcgcaaataccgtgctagtaattgggcatccagggcatcagttttggcacgaaccttcacacttttgcggtaatgactgagttcataaccaccgaccatgtagataacgcagccagcttcataggccagatcagcaaactccaagtggtaggtgttggtggcctcaatggcgatagcaacgctgcctggcaaagcccccagccacttttttatagcggctttggtattcgggattgcttccaaaaaatcgagatcggcgtgataaatcaccaattcattttttgcgacatcaataccaacaatcggcttggagacgggaactggcattgccatagtgacttcctccgggctaaggttttgagcacttgaagggctcacccagaggcgcaggcttgttcctatcgtcggtcatagccagatgcattctttatcggcgcttgggtgaaaggaggaggggcgaaatctcccacggtctgtactgcgccaacagtcagaatctggctttgtccctcctcctcccttcaagtcctagcatacaagctggctcccacaccagaccgcttttgctctacaccactcaggccggctgtcaggccgccgtgcttttgatcttgatcttgggcgccccgttaaaccacgctggccgaacgcaggtattacggagcgggtaaaccggcaggacgccggtttagccgcgacggggcagggacgccccgtcgcggcggcccgcgcagtaataccggagtgagggcacaccgagcctgggcgaggtgccgagtggtggggcaagagccctttggttactttggggctcttttccaaagtgacccgccgtaagggcggaacccatatcagccgttaccccaacaacggatatgtactcaatccaaccccccagaaaacccacccccgactgacggctattgtcagaaatttcccacaagagtacaaatgtactccatgataaccctgaccccccgccgcaccgccatcctgaccttcatccgcgaccgcatcgcacaacaaggccagccccccagcctcgccgagatcgccgaggcgttcggctttgcctcgcgcagcgtcgcccgcaaacacgtggtggccctgaccgaagccggcttcatcgaggtcaaccccaaccaagcccgtggcatccgcgtgctcaaccaacccgcacgccccgaatggctggacatccccgtgctcggccgtgtcgccgcaggcctgcccatcggcgccgatgccgaagtgcacagccgcctgcaactggaccccgcgaccttcgcgaaaaccccggactacctgctgcgcgttcagggcgactccatgattgaagacggcatcctcgacggcgacctggtcggcgtacgccgcagcgccgaggccttgaacgggcaaattgtggtagcgcgcctggacggcgaagtcaccatcaagcgtttcgaacgcagtggcgatcacgtgcgcctgctgccacgcaaccccgcgtatcaacccatcgtggtcgggcctgatcaggacttggccatcgaaggggtgttctgtggcctggtgaggcaaggctgatgggcgccgtggttgccctggactcgctgttcaatggcgggcgagtctggaagggccggcccgccgcgccaccggccagcgtgcaccccacggggctggcggcgctggacgcggtgctgcccacgggcggttggccggaggcggcgttgagcgaaattctcatggccagggaaggcgtgggcgagttgcaattggtgctgccgaccctggcgcgtttatcgatggccggggaacgcattgtgctggtggcgccgccctacacgccgtacccccatgcctggcaaaacgccggggtggatttgcgccagctgtcggtgatccaggccgaggagcgtgatgccttgtgggcagtggaacaatgcctgcgctcgggcagttgcggcgcggtgctgtgctggccgcgcaaggccgatgaccgcgccttgcgccgtttgcaggtggcagcggaaaccgggcagaccctggcgtttgcctggcgctctttgaacgaggcgatcaattcgtcacccgccgccctgcgcctggcggtcgaggccaaacccgcgcaagtgcgggtgctcaagtgccgtggcgggctggctcatccggcgccgattgcgctggcagggcattgaggttgccatgcgctgggtgtgtattgtcttcccgcaattggcgctggacggggtgcagcgtgtgcaccccgagccggaccagcctttggtattgctcgccggcacgccgcaacggcgcgtgctgcaaaccgtcaatgacgccgcccgtgctttgggtttgcgccccggccaatcgctgacggcggcgaatgccttggccaagacctttgccagcgccgaatacgaccccgccgacattgaacgttgccagcagtttctcgccgcctgggcctaccgtttcagctcccaggtcagcctgtattacccgcgcgccttgctgttcgagatcgaatcgagcctggggctgttcggcccgtggccacaatttgaagcgcgtttgcgccaggaactgaccgaactgggctttcgccaccgtatcgtcgccgcgcccaacccggcggcggcgcgggtgttggccaacctttacgatggcctggccgtcggcgatgaaacattgatgcaagccttggcccccttgccggttgaccgcgccggcctcgacccgcaggccgccaccgccttgtcgcgcatgggcctgcgcaccttggcccaggtgcaggcgttgccccggcatacgttggcgcggcgctttgaggccggcttgctcaagcatctggacgcgctggccgggcagcggccgctggccttggcgttctatcaaccaccggaccggtttgatgtgcgtatcgagctgaatttcgacgtgcaatcccatcaggccttgctgtttccactgcgccgtttgaccggcgatttgtccgctttcctctgcgggcgcgacagtggtgtacagcgtttcgacctgcacctggaacacgcccaagcgcccgacagcgtgatcaaggtcggcctgctcagtgccgagcgcgaaccggcgatgctgttcgagctggcccgtggccgcctggagcaggtgcaagttacctcgccggtgcgcggctttcgcctggttgcccaagacctgccggtgttcgtgccgcaacgccaggacctgttcgacgaccgcccgcaacaaaccctgccgtgggcacaattgcgcgaacgcctgcgtgcacgcctgggcgatgaggccgtgcaaggcctgcgttttcacgccgaccaccgccccgaatgcgcctggcagacggcggccgacaaacacccgtgcccgaccctgaacaaggtgcaacgccccggctggttgctgcacgaacccacgctgctggccgagcagggcgtacagatagtgatgggcccggagcgcatcgaatccggctggtgggacggcgccgatatccgccgcgattattatctgatccagacccgtgccggccagcaaggctgggcctaccgcaccgtggggcaaaacgacggcttgtggctgcacggctggtttgcatgagttacgccgagctgcattgcctgtccaacttcagcttccagcgcggtgcgtcgagtgcgctggagttgttcgagcgggccaagcgtcagggttacagtgcactggcgatcaccgatgagtgcacgctggcaggcatcgtgcgcgcctggcaggcggcgaaagcggtggaactgccgttgatcatcggcagcgaagtgcgtatcgaaaacggcccgaaactggtgctgctggtggaagacctcacgggctaccagcacctgtgccgcttgatcacggtggcccggcgccgtgccgaaaagggcagctaccgcctgttgcaggaagacttcgcgcagccgttgcccggcctgctggcgttgtgggtggccgacgacagcgacacccaggcctcgatccaatggctgcgccacaccttcgccgaacgcctgtggctggcggtgcacctgcattgcggccaggacgatgcgcgccacctggagcaacgcctgcaactggctgcccgcctgaatatccagacagtggcctgtggtgatgtgcacatgcatgcccgtggccgccgtgccctgcaagacaccatgaccgccatccgccatcacgtgccggtggccgaagccggcacgcgcctgcatcccaatggcgagcggcatttgcgcagcctcgacgccctggccgcgctgtacccgcaagccttgctcgacgaaacccgagccatcgcccggcgttgcaccttcgacctgagccagttgcgctatcactacccgcgcgagctggtgcccgctggccatgacgccaaaacctggttgcgcgccgtgacggaagaaggcatcgcccggcgctggccccatggcgccgatgccaagaccttgcagcagatcgacaaggaactggggctgatcagcgagctgggttacgagagttatttcctcacggtgcacgatattgtgcagttcgcccgcagccgctcgatcctgtgccaggggcgcggttcggcggccaactcggcggtgtgctttgccttgggcatcaccgagatcgacccgagccgcatgaacatgttgtttgagcgctttctgtcgaaggaacgcaatgagccgccggacatcgacgtggacttcgaacacgagcgccgcgaagaagtgctgcaatacgtgttcaaccgctatggccgcacccgcgcggcgctgacggcggtggtcagcagttaccacgcggccggcgcggtgcgtgacgtggccaaggctttgggcttgccgccggaccagatcaacgcgctggccgaatgctgcgggcgctggagcgaagatgcgccgcccctggaacgcctgcgcgaaggcggcttcgacccgcaaagcccgatcctgcgccgcgtgctcacgctgacccagcaactgatcggcttccctcggcacctgtcccagcacccgggcggtttcgtgatttccgaatacccgctggacaccctggtgccggtggaaaacgcggccatggccgagcgcaccatcatccagtgggacaaggatgacctcgacgccgtgggcctactcaaggtggatatcctcgcgctgggcatgctcagtgcaatccgccgttgtttcgacctgttacaccgccaccgaggtcgcgaccttaccctggcgacaattccgcccgaagacccggcgacctacgcgatgatcagcaaagccgacaccattggtgtgttccagatcgagtcgcgggcacagatgtcgatgctgccaaggctcaagcccaaagagttttacgacctggtgatcgaggtggccattgtgcggcccgggccgattcagggtggcatggtgcacccgtatttgcgcaggcgtaatggcgaggagcccactacctatccgtcgccgcagcttgaagtggtgttgaagcgcaccctgggcgtgccgctgtttcaggaacaggtgatgcagatcgccatggtcgccgccgactatggccccggcgaggccgaccagttgcgccggtccatggcggcctggaagcgtcacggcgggttggagccgcatcaggcgcggctgcgtaccggcatgctgaaaaacggctacaccgaggcctttgccgcgcagattttcgagcagatcaagggctttggcagctacggctttcccgaatcccacgcggccagtttcgccttgctgacctacgccagttgctggctcaaatgccatgagccggcggcttttgcctgtgcgctgatcaacagctggcccatgggcttctacagcccggaccagatcctgcaggacgcgcggcgtcacagcttgcagattcgtccggtggatgtgcaggccagcgactgggattgcagcctggagcccatcgagggccagcaaccggcgattcgcatgggcctgcgcatgatctcggggtttcgtgaggaagacgcgcggcgcatcgaggcggcccgccagcaccgggcgtttggcgacatcgccgacctcgatgagcgcgccgggctggatacccgcgcccaggcgttgctggcggattccggtgccttgcgcgcgctggcgggcaaccggcacaaggcgcgctgggaggtggcgggggtgcacaagcaacttggcttgttcgccggtttgccaggcccggatgaagcggtggtggagctgccggtaccttcggtcggcgaagacctgcacgccgactacgccaccgtcggcaccacactgggcccgcatcccttggccttgttgcgcgacgagctgcgcaagcggcggtgccgcagttcccttgaactgatggccgtggaacatggacgcaatgtgagcatcgccgggctggtgacggggcgtcagcgcccgggtacggccagcggcgtcaccttcgtgaccctggaagacgagttcggcaacctcaacgtggtggtctggcgcgacctggctgagcgtcagcgccaagcgctggtgggctcgcggctgctgaaagtggacgggcgctgggaggcggtgggcgaagtgcggcacctgattgccgggcgtttgaccgacctgacgccgctgctggaaggcataaacgtgcgcagccgggattttcactgaggccagtggtttctgcgccaattaccccctaacgtataggcattgaaacgatctttgcctggcgcgctccaaactttgccgacgtcctcttttcgcacagagtttaaccatgcagtttttatccaacccccacggctgtgaaggttgggccggtgaaatggcccagcggatccgcgggttcgactggtcggccaccgacctcggcccgatcgaccgctggtccaccagcctgacctgcaccgtgcagatgatgctggcttcacccgtgccgatggtgatgctgtgggggcgggcggggtacatgatctataacgacagctactcggcctttgccggcgggcggcatccgtatctcttgggaaccccggtggaaatgggctggccggaagtggccgagttcaaccgccatgtggtggacacctgtctggcgggcggcaccctgtcgttcaacaataaagacctggtgttgttgcgcaacggccaaccggaaaccgtgtggctggacctgtattacagccccgtcgccggcgacggccagcaaccggccggggtgctggcgattgtggtggagaccaccgaactcgtgcattccgagcacgtgcgccaggaactgacgcataacctggagcaacgggtggccgccgaagtgcaggcgcgctccgctgccgaagaccagctgcgccagtcacagaagctcgaagccatcggcggcctgaccggcggcgtggcccacgacttcaataacctgctgcaagtgatcgccggcaacctgcacttgctggcccggcatgaaccggacaatgcccaggtgcagcgccgcgttacggcggccatcgcggcggtggagcgcggggccaagctgtcatcgcaactgctggcctttgcgcggcgccaacccttgtcgccggcggtgtacaacccgcaacgcatctacgcggggctgggcgagttgctccagcgcgcgctgggggaaaccatccatatcgacgtgcagttgccccaggactcgtggtgcatcaatgtcgaccgcaaccagctggaaaacgcgctgctcaacctggcgatcaatgcccgggatgccatgaacggtgagggcgtgattcgtatcaccggcgaaaacatcatcctcaacccgcacgattgcgccggtaaaagcatcaagccgggcgagtacgtgcgcctggcggttaccgacaccggcgtcggcatgccggcggccgtgctcaaacgcgcttttgaaccgttcttcaccaccaagcgtgaaggccagggtaccggcctgggcctgagcatggtgttcggctttgtgcgccagagcggcgggcacgtggagatgtggagcgaagagggcaagggctcggtggtgcagatgtatttccctcacagcctggagccggaaagcctggacatcggcagcgaactggcgctgcacagcggcggccaggaaactatcctggtggtggaagacaacgaaggcgtgcgcctgaccgtggtcgagttgctggagcagtccggctacactgtgctgaccgccgaagacggcgaccgcgcgatgctggccttgcaaggtggcgcgctgccggacctgatcttcaccgacgtggtgatgcccggccgcgtgaaaagcaccgacctggccgactgggcccgcgaacaacagccgcccgtggccgtgttgttcacctcaggccacacccgcgacatcctctccaccaaccacctgctgagccccgacattcatctgctgagcaagccctacagccccgaagccctgacgcatcgggtgcgcagcgtgctcactgcaagacaaggttgcccatgacgtcacagcgcaccatccccccgatcactgcccaacgcccaggttttgtccgggtgcgcggcgcccgcgagcacaacctgcgcaacgtcgatgtggatattcctcgggatgccctggtggtgtttaccggggtgtccggctcgggcaaatcgtccctggcgttttccacggtgtacgccgaggcccagcgccgttatttcgagtcggtggcgccgtatgcgcggcgtttgatcgatcaggtcggcgtgccggacgtggactccatcgaaggcctgccgcccgccgtggccctgcaacaacagcgcggcacgccgagtgcacgctcgtcggtgggcagtgtgaccacgttgtcgagcctgatccgcatgctctattcccgcgccggcagctacccgccggggcaggcgatgctgtacgccgaggacttttcgccgaacctgccccagggcgcgtgcccggaatgccacgggttgggccgcgtgtatgaggtgaccgaggcgctgatggtgcccgacccttcgctgaccatccgccagcgtgcggtggcggcgtggccgctggcgtggcaagggcagaacctgcgcgacatccttgtgaccctggggtatgacgtcgacatcccgtggcgcgacctgccgaaaaaacagcgcgactggatcctctttaccgaagaaactccaaccgtcccggtgtacgcaggttttaccccggagcaaacccgcgaggccttgaaacgcaaggtggagcccagctaccagggcaccttcagtggcgcgcgacgctacatcctgcacaccttcacccacacccaaagcgcgctgatgaaaaagcgtgtctcgcagttcatgcagggcagcgcctgcccggtgtgcgacggcaagcggctgaacaaggcggcgctgtcggtgaagtttgccggggtggacattggcgcgttgtcgcaattgtcgctggcgcagctggccgagctgctgcgcccggtggcggcggggcaggacacgatgaagctgtcggtggaaaaacgcctggccgcgcaacgcatcgcccaggacttgctggagcgggtcagcaccttgaccgagctggggttggggtatttgtccctggagcgcagcacgccgactttgtcgtccggcgagttgcagcgtttgcgcctggccacgcaattggggtcgcaattgttcggcgtgatttatgtgctggacgagccttcggcgggcctgcatccggcggatggcgaagcgctgtacagcgcgctggatcggctgaaagccgccggtaattcgttgtttgtggttgagcatgacctggaaaccatgcgccgcgctgactggctgatcgacgtgggcccggcggcgggtgagcatggcgggcaggtcctgtatagcgggccgcctgcggggttggccgagatcgaagcctcacagacccgtgaatatttgtttgccgaacggcgcccggccaattcggcgcggcgtgaaccttccggctggctgaagctggaaggcgtgacgcgcaataacttgaagaatttgaatgtggattttccgctgggatgctttacggcggtgaccggtatctccgggtcgggcaaatcgagcctggtcagccaggcgttgctggagctggtgggcacggggcttggccgtgtactggaaagcgacgacgaaccgagcctggaagatgacgcgccgcaagccagcggcgggcgtatcagtgccgggctggagcacatccgccgcttggtgcaggtggatcagaagcccattggccgcacgccgcgttccaatcttgcgacctacaccgggctgttcgacaacgtgcgcaagctgttcgcagccacaccggcggcgaagaagcggggctacgatgccgggcagttctcgttcaacgtcgccaagggccgctgcccgaactgtgaaggtgaaggctttgtcagcgtcgagctgctgtttatgcccagcgtgtatgcgccgtgcccgacctgccatggggcgcgctataaccctgaaaccctggcgatcaaatggcagggtttgagcatcgcccaggtgctggggttgacggtggaacaggcggttgaggtgtttgccgagcagcctggggtgttgcgttcgttgcaggtgctgcgcgatatcggcctgggttatttgcgcctggggcagccggcgactgagttgtcgggcggtgaggcgcagcgcatcaagctggccaccgagttgcagcgcaatgcgcgcggggcgacgttgtatgtgttggatgagccgacgaccggattgcatccgcgagatgtggaccgcttgctcagccagttgaatcacctggttgaggcggggcacacggtggttgtggtggaacatgaaatgcgcgtggtggcgcagagtgactgggtgatcgacatcgggccgggggctggggacctgggggggaaggtggtggccagtggtacgccgcagaaagtcgccaaaagcaaaaccagccggactgcgccgtttttggcccgagagctgatctaacgtcaacacccatcaatgtgggagctggcttgcctgcgatggcggtagcccagtaccagaaatgcaagctgacagaccgctatcgcaggcaagccagctcccacctttgatcttcatcgctggcaaatacgtgcccggcgcgatgacgctggtttcccaaacaccacaaatcccctgtgggagctgtcgagccccggcgaggctgcgaaggcggtggcatagacaacatctctatcaacagtgccgccgctatcgcagcgatgcggcgacccgacaagccagctcccaccgttttgatcaggggcgggtcagctggatttgtgctttcgcttgcttcaccacattttcaacggtgaacccgaatttctcctgaagcttggccaacggcgcggaagcaccaaagctgttcatcacgaccttggcgccggtttgcccgacataccggtcccagcccaaaggcccggcctgttccaccacgacccgcgctttcaccgctggcggcaacacactgtcgcggtaagcctgatcctgatcctcaaacagctcccagctcggcatggacaccacctgcgcggcaatcccttcgcttttcagctgttcatacgccgccaccgccaggctgacctcgctgcccgttgccagcagcaggacctgggggctgtcgccagccgccagcacataagcccccttggccgccccggacgctggcgcataccgggtacgatccagcgtcggcaacgcctggcgcgacagcaccacacaacttggccggtgggtctgcgccagcgccaccttccacagctccagcgtttcattggcatcacccgggcgcaaggtcagcagcccaggcgtggcgcgcaactgggtcaaatgttcgatcggctgatgcgtcggcccgtcttcacccacgccaatcgagtcatgggtaaacacaaatatcaccggcaattccatgatcgccgccaaacgaatcggcggcttcatgtagtcgctgaacaccaggaacgtcgaggtgtagggccgtaaatacgacagcgccataccattggcaatcgcgcccatggcgtgctcgcgaatgccgaagtgcaggttgcgtccgctgtaatcgttggcgctgaagcgcccggcgccgtcgaaggtcaggttggttttggtcgatggcgacaaatccgcagaaccgccgagcagccaggggatttgttgagcaaaggcgttcaacacctcgccacccgaggcgcggctggcgatgcctttggcatcggctgcgaagccgggcaattcatcttgccagtgctccggcatttcgccggcgcgcatgcggcgcagttcatccgcccgttccggctcgtactgttcaagctgcgacaagtgcccgtcccaggcttcatagaggggccgcgctcgctcaaacagcgcgtcgcgcagcaccgtgcgggcttcatcgggcaccaggaaactggaatcttccggccagccatacgccgccttggtcaggcgaatttcctcttcacccaacggttcgccatgggcggcggcggtgttgtgtttgtgcggcgagccatagccgatcacgctgtcgaccacgatcagggtaggcgcaccggcagtggcctggaaggtttccagcgccgtgctcaacgcctgcaagtcattggcgtcggtgacgtgcagggtgtgccagccataggcctggaagcgcttgatcacatcttcactgaatgccaactcggtgtggccctcgatgctgatggtgttgttgtcgtagatccagcacaggttatcgagcttcaagtgcccggcgatggacgctgcctcactgctgatgccctccatcatgtcgccgtcgccacacaaggtgtagacgttgtagtcgaacagcacctgaccgtcgcggttgaagcgctcacccaaccagcgcccggccatggccatgccgacgctgttggcgcagccctggccgagcgggccggtggtggtttccacgccggtggtcatgcggtattcggggtggccgggggttttcgagtcggcctggcggaattgcttgatgtcgtccaggctgatcgcgggctggccggaacgcttgccgtgggcgtcaatctccaccacgccggccaggtgcagcagcgaatacagcagcatcgacgcatggcccaccgacaatacaaaacggtcacggttgggccagtccgggtgttcagggtgatagcgcaggaagcggctccacagcgtgtaacccacgggcgccaggcccatgggcgttcccgggtggccggaattggccttctgcacggcatccatggccagggtgcggatcgtgttgatgcattgggtgtcggcggcggtggcagcgtgagtcatgaaaccggtctccctcgggtggcgatttacagtggagggcagggggtggcaaaggtttgatcccatcgccagcgttgcgacgaacggggatggattgatcccgaacatgacaagaccccgcgcaatgggctagcttcaggagcgtaggccattgatcaacttgcggaggtattccatgccagtgaaacacgacctgtatcaggacttggggttgagcaaggaagtcgttcacgaacgcagggcgggcgataaacggctggactcgttgttcagccaatacgacgctgccgatggggaagtgcttaaggcagagtcggccagtgccagcgatgaggatgtggagaagctgaagaagaaacggttgttgatcaaagacgaaatcgttgggcggttgaactgagtggtcgcccgtggtcctacaggccacggacacatttgttcagaattgcctgagggacagggcgcttttgactgaatatgatgcgccccgtccacccggctctggggactgttgcggcgcaaggattgcgctgctgagccgggtgggcatctctatttcacgccagcagcgcctgggtgcacacctctatagaacgctgctgcgtctcgccatacagcttcaattcatccatcgtctgacggcccagcgcgtgctcgaactcgagcctgtttgagttggccgcatagtggctctgcgccgcgtcgcccaggttggactgaaagatccccgccgcactcaccggcagaaaatcctcatacaccaagggctccacgtcgatgtggcccgcagcgatcagcgcctccactgtgcgcggctgatccgctgcaccgcgcgccgccaggccttgttcggtggtgaagtagcggaagtaggccaggccctgttcacgcatttgcgcgtgatcatccgggaaggcctggaaatgctgttccatcaattgcgtatagcgtgtggcgttgccctcattcgggaaagcgcccagttcgtcgcgcgcggcgttcagcaattggtcatacagtgcgcggccttcgggcgtcagcgccacgccgcgctgttcgatttcaccgaaacgcgcgctgtggctgcctttggcgtcggtgaaggcgatgggctcatcgagggccttgaagctggtctggcgcagcaggatcgggcactggcggcgcggcggcccttcgatgacggcttttggcgtgatgcctttgccgggcatggcggcttgtacctggtcgatatccagggtgcggggggtcaggtggttgatatgcggcccacggaatgcgactacgtcggcgatcaatcggtgctggtcactcagttgctggtattgagcgccggtcacggtggctgtgtggtgccaacggaaggtctccagggcctggcggatgaacgcttcggcgtcttcggcgttgaggccgccatcacgttccgcttgctcgatcagcgccagggcgcccggcgtgaagatcgagcgtttggccaaagcactctcggcgaacgcgcgcagttcaaggttttcgatcagttccaggcgcagcagcgaggtgaacacgcggaacgggctggtttgcagtgattgctcatgcaccgcgcgaaacgccgtggagtgcaccggcacaccggccggcgtcaggtcgtaataccccactggctgcatgcccatcaccgcaaaaagccggccgatggtggccagttcggtcgctgtgcccaggcggatggcaccgtggcgctccatgtccaaacgctggatttcacccgtgcgttgcaggtgcgcggccagcgcttgatcgtgcgccaaaaccccggcattggtctcggccaccagctccatcagcgcgccatacagcggaacttcatctctgtacatgtcggacatggctcgggagaaacccttgcggatgtcgtcggggctgacataagcgacggttggcatagaaaaattcctgaacacggtgggaggaggtgaggccgttgtctggattttgttgggctgggcgcggccatgcaaacgaagaatcttcaggacttcattcttcaagcgaatgaaatgacggaaatatgacaaaaaacgacggctgtgaaatttcattttcgagggggttttcctaactaattcttcacgaggagcgccggggccgtcatgaaacaatcgtcacgtttgtagggatgaaagctgttctgcacacaccgcacataaaaatatgtttaggggccgtcgttaatgaaaatttctacactggcgttatccatcaccgccgccttgctcgcacaacaagccagcgccgatgatttcgggctgggttcgctgggcacaggtaccggacacagcggcttcctggaagacagccacgcggctatcagctcgcggaccatgtactacagcgcagacaatcgttcggggaccagcaacgatttgcgcgaagcggcaacactgctgcgctttgactacaaatccggcttcacccaaggcaccctcggggtcggcttcgacgtgatggccttcggcgccctgcgtctggatggcggcgatggccacaccgcgggcccaggcttgtccggcaacggcaacagcttcttcccgaccaaaaacaacggcaccgagccggctgactcctttggtcgcgctgcgggtaacgtgaagttccgcatttcccagaccgagttgcacgtcggtggtggcctggcgccggtgttgcctatcctggtgtccaacgacagccgtgtagcgccgcagacctttgacggcggcatcctgacgtcgagcgacattccgaacgtcaccttcaccggcggtgagctgaacaaggccgaaggccgtgcgtccagcaactccaccggcttgagcgttgccggcggcacccgcgacagcgacagcttcaaattcggtggtgtggactacaagcctttcggttcgtctgacaacgccatcgctaaaaacctgacgttgcagtactactacgccaacctgcaagacttctacaaacagaactacttcggcctggttcacgtactgccgctgggcaacgatcagtcgttcaagactgacctgcgctacttcgacagcaccagcgacggcaaaaacggtgaagccggctaccagttcaacaacaacggcggctatgccaaacacgccggcgaagtggacaacaaaacctacagcgccgcgttcacctaccagttgggcggcagcagcctgatgctcggccacatcggcgtgagtgatgacggcggcttcgtgtgggtcaaccagggcagcatcgccaaccctcagccgcaaggcgcaggcggcagcgacttctacctgttcaccgacgccgtggttggccagttctcccgcgcgggcgagcaagtcaactttggccagtacacctacgacttcaaagcctttgtacccggcctgaaagcttctgtggcgtacctggacggtaccgacatcaagtccaaagtggcgggcggttccgaccagaaagaaaacgaaaccgacttccgtctggattacgttgtgcaggaaggcccgctcaaaggcttcggcactacgttccggaccggtacttacaaaggccacaacaccggtactgcagaccaggatcaaacccgcctgatcttcaactatacctacgcgatcttctaagaacgcgctgcaaaactccccatctggagcgctgtaaaactgaaggccgcctcatccgcggccttcagtctttttagcgccggggtgactcttcatgtgcatccgggggcggatgggttctacactggccgccactgtgtcagtgctggaggacccgatgcccgtcacgcccgccaacatccttgaaacactcgaaggccaacgcctggccacccatgacgccgcaagctggcgcgaatggggcccttatttaagtgaacgccaatggggcacggtgcgcgaagactacagcgccgacggcgacgcctggacctacttcccccatgaacatgcccgcagccgcgcctaccgctggggcgaggacggcctggccggtttcagcgacaaggcgcaacgctggtgcctgggcctggccctgtggaacgagcgtgacgcaatcatcaaggagcgcctgttcggcctgaataacgccgagggcaaccatggtgaagacgtcaaggaactgtactttttcgtcgacggggtgccgagccatgcctacatgcgcatgctctacaaatacccccacgcggcctttccctatgctgacctgatcagcgaaaacgcccggcgcggcctcggcgatgccgagtacgaggtgctcgacaccggcgtgttcgaagacaaccgctattgtgatgtcagcgtcgaatacgccaagcaccagcccgacgatatcttcatgcgggtcacggtgcataaccgctcggaccagccgacgcgcctgcaggtgctgccccagttgtgggcgcgcaacgactggagctggaccttcgacgcacccaagccgcagttgacgctggacggcgatcacgtgttggcccgtcaccacgagctgcccgatcgccacctcagtgcctggggccaggacggggtggagtggctgttctgcgaaaacgaaaccaactatcccaagctggacgggctggcgacgctcgggccattcaaggacggcatcaacgattacgtggtgggcggcgtgcaatcggcgattcgccgcgacgcgggcaccaaggtggccgcacgctttaccctcgaactggcgggtctggaaagcaaaatcctctacctgcgctttgcccccacggatgcgccccaggtcaatgcgcgcaagctgttcgaagcgcgtcgccaggaagcggatgacttctatgcagccctgcaacacggcatcagcgatgaagacacgcgcaatgtgcagcgccaggccctggccggtttgctctggtccaagcagctctactatttcgacgtgaaccagtggctcgacggcgacccggcccagcccgcgccgccgcccgagcgcctgcacatccgcaatacccattggcggcacctgtcgaacttcgacatcctgtcaatgcccgacacctgggaatacccgtggtacgcctcgtgggaccagggctttcaggcagtggcgatggcgctgatcgacccgggctatgccaagcaacaactgttgctgctggtgaaggaccgtttcatgcaccccaacggccagttgccggcctacgagtggcgttttgacgatgccaacccgcccgtgcatgcctgggccagctggcgcgtctatcagcaggacaaagcgctgaccggcgtaggcgatatggatttcctcgagcgaattttccataagctgctgctgaatttttcctggtgggtcaaccgcaaggacgccgaaggccgcaacctgtttcagggcggctttctgggcctggacaacatcgccttgttcgaccgctcggccaccttgccgccgggttaccaactggatcaggccgacggcacggcgtgggtcgccgcttacgcgttggacctgatgcgcatcggcctggagctggccaagcgcaacgcggtgtacgtggatatctcggtgaagttttttgagcatttcctctacattgccggcgccatcaaccgggtcgacgacaatgccgaaggcttgtgggatgagcaggatcaattcttttacgacgtgctgcaccgccctgacggccagaacgagccggtgcgcctgcgctccatcgtcggcctgatgccgctgtttgccgtgctggtgctggagcagcgtgaacatgaggggctgcaaggtttgcgtgagcgcttgctgggcttcatgaaacaccggccagacctggccaagctggtgtcgcgctggaacgagccggggcagggcaaccgcctgttgctggcgctgttgcggggcgagcgcaccaaggacctgctgcggcgcatgctggatgacaaggagttcttgtcggcttttggtgtgcgttcactgtccaaggcgtttgccgagcagccactggcgctgaagatgaatggcgacacgctgtgcgcacgctaccagcccggtgaatccgactcacgcttgtacggcggtaactccaactggcgcgggccgttgtggatgccggtgaactacatgctgattgaatccttgcgcgagtttcaccgttactacgccaacaatttctcggtggagtacccgacgggcagcggttatctggcgtcgttggaagaagtggccgacagcctcagtcagcgtctgacgcgattgttcctgagggatgaaaatggcctgcggccgtcgatggccgggtatgcgcaactggaggccgacccgctgagccgcgatctggtgttgttccatgagtatttccatggcgagaccgggcgggggtggggggcgtcgcatcagacggggtggacggcgttggtggcgttgttgctgcaaccgaaagcctgactgttgccactcgcagcctgtgggagctggcttgtgtgggagccgggcttgcccgcgatgcaggcgactcggtctgtcagggaaccgaggtgatgcgatcgcgggcaagcccggctcccacagggttcacattgagcacaagattgcaggcaaaaaaatcccgcctctggaggcgggattggtcttcaaggttgcccttgaatcaagccgggaacagctcgctcagcttcatggccagcatcatgtcgccttcagtgcgcagtttgccgctcatgaacgcctgcatgccgtcggtgtcgccgctgacgatgccttccatggtttcgccgtcggtgaccagagtcacttgggcgtcagggttttcgccttccagcagttcgcaggtgttgttcttgaccaccagcgagaaattctgggtgtcatcgatacggaaaccgaacaccagatccaggccgtcagcggcggccgggttgaatttggctttcattgcttctacagctttggctacgtcagtcatggtttcgatcctttaaggtagagtccagtgaccttggggtcacggttggccgcaattcaccggaaagtgatgagctgcggcgccttcaacagttgcaagtgggtatgaccgttgaaggaagccagggccacctcgcgaccgcggaatttcagctggttaagcgaggtgttaacaatttgccagttcagttcgaaggcctgcgcggcaggcattcgggtaatcaagtggagcagggcggtgatggtgccgccggaggtaaacacggcgatcttgtcggcgttgcctgcggcttccagaatgcgttgcaggccgccttgaacgcgctcgacaaagcccagccagctttccagacccggtggatcataagtgccggccagccagcgctcgatgatcagggcaaagatgcgttggaactcgctgcggttttgcgcgccgttgcgcagcacttccacagcgtgaggctcggtggcgagcaggtcgggcagcaaggcgcgaatgatcgcttcggcgtcgaactcattgaatgcgctgtcgatttccaggcgcggtaccggcaggccaagggcggtgtactgatcaaaggcggcggtggcggtgtgctgctgacgacgcaggtcgccggcgatgcagcggtcgaacgtcaggcccaggtcagccaggtggcgaccgagcacttgcgcctgttccacaccgacgggcgacaggacgtcatagtcgtctgcaccgaaggaggcttggccatgtcgaatcagatagatgctgcccacgtccgttttcccggtacgttgaaagtctggcgaggttatgaggatgcctgcgagctgtcaatgaaaaaacatacgcttgttttaaaagctcgttagaggcgctctgctggcggtttgagcactggctcgaaggctgtgccgtcggtatgctggggcaatccgcgcctggcgccgtgcaattttttaaggagtcatatggattttctggctgaatacgcgagtttcctggcgaagaccgtcaccctggtggtcgctattctggtggtgttgatcagcttcgcggccttgcgcagcaaaggccgtcgcaaatctgccggccagttgcaggtcagcaagctcaatgacttctacaagggcctgcgcgagcgcctggaatcgaccttgctcgacaaggaccagctcaaggccctgcgtaaatccgaaagcaaagccgaaaagaaaaaaggcaagaagaagcccgaggccaagcctcgtgtgtttgtgctggacttcgacggcgacatcaaagcctcggccaccgaaagcctgcgccatgaaatcaccgcgctgctgagcctcgcgacaccgaaggacgaagtggtgctgcgcctggaaagcggcggcggcatggtccacagctatggcctggcgtcttcgcaactggcgcgtatccgccaggcgggcgtgccattgaccgtgtgcatcgacaaggtggcggccagcggcggctacatgatggcgtgcatcggcgagaagattatcagtgcaccgtttgccatcctcggttccattggcgtggtggcgcagttgcccaacgtcaaccgcctgctgaaaaaacacgatatcgacttcgaggtgctgaccgccggcgaatacaaacgcaccctcacggtgtttggcgaaaacaccgagaagggtcgcgagaagttccaggaagacctggacatcacccaccaactgttcaagaacttcgtgtcgcgttatcgcccacagttggcgattgatgatgtcgcgaccggtgaagtgtggctgggtgttgcagccctcgacaaacagctggtagatgagctgcaaaccagcgacgagtacctggcgaccaaagccaagaccgccgaggtgttccacctgcactatgccgagcgcaaaagcctgcaagagcgcgtgggcctggcggccagcggttcggtggaccgcgtgctgctgacctggtggagccggctgacccagcagcggttctggtaaccgaatctccagaatgtaatgagtcaccctgtgggagcgggcttgcccgcgatagcggtggttcagtcaatctattcgtaggctgacacaccgtaatcgcgggcaagcccgctcccacattcaggttggtgtcggcgcggaggactgttgcgccaaggggatcgggttacgcatcaaaatccccaccaccagcgcccccagcaaccccaacaaccccgccacccacaacaccccgctgaacccgcccacaaatgcctgccgcgccaatggctgcaccagcgcccgtgccgattccggcagcaaacccatcgcggccggcatatcgcccgccaccacccgcgacgcaatgcccactacttgcgcttgccactgcacgccgatactcgcactcagcaactgctcgctatggctgctcaacaaagccccatacaccccaatcgccaacatgatcgcgctgaaacgcatggtggtgctcatgcccgaccccatgcccgcgcggtcgcgcggtatgcaggccatgatgtttttctgggtgtcgccattgagcaggccggcgccggcaccggtcacggcaatcgccagggcgaacggcaggtagccgccgacattgaccgcccaggcgctcaacaggttgccgcaacccaccagggtcaaaccggcagccatcagcgttgccggggcaaaacgaccggccagccgcgcaccgatccttgggcagatcagcatggtcaaggcaaacggcagcatgcccaggcccgagtggatggcggagaaacccaagccgttttgcaggtagaacggcagcagcgtcatcatcacctgagcacaaccggcgtaggcaaacatccccaacaaagcaccgataaagcgcgggtggcgaaacagttgcaagtccaccatgggccgttgttgcacgcgttcgacgatgacaaacacgcccagcaataacgcgccgcccaccaggcgcgcgccggtcagcgggttgccccagccgatgcggttggcctcgatcaggccccagatcaggcacagcaggctggcgctgaacgccaggctgccccacgggtccaggcgtgcggactgggcgtcgcgggactccggaatcgcgcgcactgccagcgtcatcagcgccaggcccaccggcaggttgagatagaagatccagcgccagcccaggtactcagtgatcaaaccacccagggttggcgcggcagtcattgccacgcccatgcaggcgccccagaaggcccaggcttttgcgcgctccacttcatcgtgaaaggtgtggccgatggaggccagggctgaggtcagcagcaaggcggcgccgacgccttttaccgcgcgggaaatgtccagaaacaaggcattgggcgcagcgccgcagcccagggaggccaggatgaaaatactcaggccccagatcagcgatttcttgcggccaaagcggtcggcaatgctcccggcgggcagcagcagggcggcgaaggccagcatgtaggcgctgaccacccattcgatatcggcgaagttggcccccaggtcgcgggcgatgcttggcagcgtcaccgcgacgatattggtgtcgagcacaatcagtgagcagacgcccgaggcggtgagcaacgtcaggcgtgggctgacccggctcatggctgaattaccttgcaggcaatacggaaatgacggttgacggacatcgcaggggctctctagtgttgaggtgctgcaagcttatccttggccactgctgcccttgttagctgccaagaagcacttcattacctttgagctaatcctgagatggacatacgccacttccgctacttcctggctgttgcccggcagcgcaatttcacccgcgcggctgagcaattgggcatcgcacctcccacgttgagccggcagattcaggacatggaaaccgacctcggcacgcgtttgtttgtccgccagcagcgcgaagtcagccttacggaagcgggcgcggcgttgctgatcgaggccgaagccaccgtacgccaattcgaatttgcccagcgcagtgcgcagcgggccggacgtggcgagattggccatatcgaactgggctatgtggcctcggcggtgtattccggcgtattgcagcggcaaatgcaggcgttcagccaagcgtttcctgatgtcagcgtgaatgtgcgtgagtgtgcgatggccacgttggcgggcgccgtggcagatgggcgttgcgacattggctatatccgttcacccatgacgttgcccgagggggtggaagcggtgcgcctggacagtgaaagctttgtgttggcattgccccaagactcatggctgctggggttgaaagccattcactgcgagcacctgcaaaacgagaccttcatcttgccggaacaaatcagcggtaccctgcacgtggcggcacaagggggctatgcaccgcgtctcggcccgcagccgggcgggttggtggccgtggtcgcgctggtgtcgctggggcagggcgtggcggtggtgcctgcatcgctggtgggccatgtgagtttgccgggggtggtgtaccggcccattcagggcaatgacgctacgtcctggctgtcgctgatccaccggcgcttcgagaaggcgccggcggtggtgcggtacattcagcaggtcaaaatgagtggatgagcacagggcacagttcctgtggtgtcaagtgaggcgaggttggactgaatccgccaggcgggtaaggatcaggcagcacgacaccgccccggcgtccagcacgcccagcgagcgctcgcccaaacggctggcccggccgatttttgcgatcaggtccttggtcgagtcgcggccttgggacgcggcggctttcatagcgtccagtgcgtcgttgaaagaggatccactggcatgggcgcgctcgaaggcttcaaccgccggaatcaaagtgtccatcaaacacttgtcgcctacgccggcttcggtaatgtcctgcaacgaggtcaagccgccgcgcagcaaatgggcgaaggtcgccgcgtcgatgtcgtcactgctgcgcacttcatcggccatgccgataaacaggctgccatacagcggtcccatggagccgccgatgccttccatcaggctcagggtcagttcatccagcgcctcggccagggtcaattggcggccttctatcgtgcgcccgcaatgggcgaagcccttggccatgttgatgccgtggtcgccatcaccgatggcgccgtcgatttcgctgaggtattcacggttggccacgatcacgctgaccaggtcgctgacgatggcaccgccgtcacgggtggaaaaatgctggctcatggttcactccgcctgggtcatgccgatggagcggcagggttggtcgatcagggttttaagctccgcgtcgaggccgagcagggtgagggtcacgcccatcatttccagtgacgtgaagtagttgcccacgtagcagcggtgaatcttcaagcccttggccgtgagctggcgctcgacttcgccgtagaaaatatacagctccatcaccggtgtggcgccaaggcccgagaccagcaccactacgctgtcgtccgcgctgaaatcgcggtcggcgaggatcggcacgagcatgcgctcggccatggcagcggcagattcaatggggatgacttcaatgcccggttcgccgtgatggccgatgcccagctccatttggccgtccggaatctggaagttcggcttgcccacggcggcgatggtgcagggcgtcaggccgataccgatggagcggcagttatccacggttttctgcgcgacgcggatcaccccgtcgaggtcgtaatgctgggcggccgccgcgccgccgatcttccacatgaagatttccccggccacgccacggcgcttggcgatatcggccttgggcgcagacgccacgtcgtcgttggccaccacagtgcggatgcgcatgtctttgctggcggccattttcatggccagcttcacgttcatgttatcgccggcgtagttgccatagaggcaggccacacctgcgccatggtcggcggcgcggaaggcgtcgaagaagcttttggcggtgggtgaggagaaaacttcgccgacggccacggcgtccaccaagcctgggccgacatagccgagaaaggcgggttcatggcccgagccgccaccggtgacgatgccgacgcggccctgcgcggaaggtttggccttgacgatcacccgagggttgctctcgtattggcgcagttcggggtgcgcgaccagaatgccgcgcagcatgtcctcgaccacctggtccggatcattgatgactcgattcataacgcgggttcctgttcttgttctgtgtgggcaacatatttcaactgtgggagctggcttgttgtggcgagcaagcttgcttgcgctggggtgcgaagcagcccttaaatcctgggagcgcttcgcactccagcgggagcaagctccctcgccacaacaagccgctcccacaaggggcagcgtcggtgaaatcagggttcgagcaccactttgagcgacttgtccccacgctccatcaccgcaaacgcttccttgaagtccgccagcgcaaacttgtgggtcaccacgtcgcgcatgtcgatcttgcggttgccgataaagtcgatggcccgcgggtacatgtatgggcccaaatgcgagcccagaatatccagttccttgcgatcgccgatgatcgaccaatctaccgtggcctcgtcattgaacacgctgaattcgacgaaacgccccagcttgcgcagcatcgccaggccctggttcaccgccttgtggtgcccggtggcttcgatatagatgtcgcagccataaccgtcggtgatttcgcggattttggccatcacgtcgacttcggccgggttccacacttcgtcggcgcccatgcgcagggcgagggcggcgcgttcgggtttcatgtccagcacgatcagctttttcgggttgcgcaggcgtacggcgccgatgatgcccaggcccagcgtgccggcaccggccaccaccacgacgtcgtcatggtcgacattggcgcgctctgcggcatgcagcgagcaggcgagcggttcgatcaggatcgcctcgtcgggtgcgatggcttccggcactttgtggatgatgccttccttggtgaagatcatgtactgggccatggcgccctgcacattgttctggaagccatacaagtcgtgcttctggcacatccagtactggccgtggttgcagaagcggcagccccagcacggcacgatctgttccgagatgacccggtcgccaacgcttacgccgcgtttttccgcgccaggcccgagcgcgaccacgcggcagacgaattcatgccccgggatcatcggcggtttcacgtagcgtggctgctcggcgtcgccccagaaagacggtgcgccgcggtaggtcttgatgtcgcccatgcagatgccgcacagctcgaccttggtcagaatttcgtcgggcccgggtgtgggcacgtcgacggtttccaggcggtagtcttccgggccgtggcagaccacggcctgcatggttttcgggatgaccggggacagttgttcaggtgtgcgttcggtgacggtggacatgacaaaacctcacggcaagaaatgaattactgaatgctgtagccgccatcgatcaccatgttggcgccggtgatcatctgcgcggcgtcgctgagcaggtacaacgccagcccggcgatttcttccggttgggcaaagcggcctgccgggatctgcaatttggccttttcccccacttcaccggcccaggctttcttgcccaaggcggtctcgacgatggtcggggagatggcgttgacgttgatctgcggcgcccattccatggccagtaccttggtcatgccgacaatggccgccttgctcgcgcagtaagcgacgtggcgatccaggccgatgacggcggcctgggaggcgaggttgacgatgcgcccgctgccctgagccagcatgtgtttggcgcaggcctgggccacgaaaaaactggctttgaggttgatgtccagggtggtgtcccaggcgctttcgctcacgtccacggctttgtcgagcagtacgacaccggcgctgttgatcaggtagtcgaggcgttggaagtgttcgaatacgcggtcaaccgtgtgctgtatctggccgatctggccgaggtcgacggcaatgcccaggtgcccggcaccgaggctggcggcgacttcaaccacggccgggtcgcggtcgagcagggccacgcttgcgccacgctcggccagcaaggtggcgcaggccaggccgatgccggcagcgccgccagtgatcaccgcgcagcggccggtgaggtcgaaggcttggttccagaaacccgacatgaataactcctctttcaaaagcactgaagatccaatgtgggagctggcttgtcggatcgccgcaccgctgcgatgcagacacctcggtgcgtcagttacacccggttgatgtcatcgcaggcaagccagctcccacactggaccctgtttcaagtcaatacttacttaccgccgctgacttgctggtacagcgcatccgcattcgcattggtcaccggcacccacggcaggatgtagttcttggccgtgccatcgccccatttcacgtccttggcgtagcgctcccaaatcaccgactgcggcttgtaatccttgccggccagtgcgcgcaatgccacatccaaagcgccttgggattgggcctgggcgtcttgcaggaaggtggtgacttcatctttctttgccgcctggatcgcgtccggcatgccgtcaatcgaggtgaccggcacgtccttggacgacaagccatgggacttcaaggcctgcaccgcgccgagggccatgtcgtcgttctgcgcgatcacaccgttgatgcctttggggtgggcgttcagccagtcttcggtgagggtcaaggcctgggcgcggtcccagttggcggttttcttctcgatgatcttgatgtcagggtgcttgctcaacacctccagctcgcctttttcgcggtcgatttgcgccgactggccaatcggcccctggatgatcaccacgttgcctttgccattgagcttgtcgaccatggcctgggcctgcaggcgaccgccttccacgtcgtcattgcccacatacggcacggaggcatcggctactttcgtattggaggcgatgaccaccacgtcgttgctcatggcttgcttgacggtgccgacgccggccttggtgtcgataggtacgaacaagatggcgtcgtagtgttgggtcaccatgttttcaatctggttgttctgggtcagggcgtcgtagttgccgtcaaacacggtcaattgcacggtgccgtccttgactgccgggtgttccttgagctcacggacccagttctgcatgaactggcccttgaggccgtagacggcggcgccgattttgtacgtcttgccatcggctgccatggcgatactgctggcgagcagggagagagccgccacggcggccaaggtggtacccagtttcataagtagaactccggttattgttgtgggtcgttctctagcgttttttcttgcgccacacgtcgatcagtactgcgaacacgatgatcaggcccttggcgacctgttggtaataggaggacactccgagcaggttcagcccgttgttgatcacgccgatcagcagtgcgccaaacagcgtgccgacaatgctgccggtgccgcccgagaggctggtgccgccgatcaccacggcggcaatcgcgtccagctcgtaggaaaccccggcctggggcagggcggaggtggtgcgcgccgacagcacgacgccagccaaccccgcgagcaaccccgagaccacgtacaccgaaaacatcaccttgcgcacgccgatgcccgaggtgcgcgcgctcttttcattgccgcccaccgcgtacacatagcggccgtaagtggtgtagcgcagcaccatccagaagatcagcgcgaccacggcgaagatgatgatcgggatgccgatcgggccgatcttgccgatgcccagtgccaggtaagcgtcgggcaggtcggtgatcgggctgccgtcattgaggatgaaggtcatgccccgcgcgatgctgagcatgcccagggtggccacgaagggcgggatcgacaggttggcgaccatgaagccgttgacgacgccgagcatcgccccggcaaacatcccggcgctgacggcggcgagcaagccgtaaccctgagtcgcgaccatggcgctgcacagcccggcgaaggccagaatcgagcctaccgacaggtcgatgcccttggtcagaatcacgtaggtcatgcccacggcgaggatgccgttgatcgaagtctggcgcaggatgtccatccagttgcgccaggtcatgaagtattcgctggaaaacgccatcaccacgcacagcaggataaacaccagcggcaggccgaaacggtcgagggacaggcgcaggcgattgcgcggctgggctgtgatgggagcagtaatggaggttttggcattcatgaggcaagactcagcaaggcttcctgggaaagggcggtgtcggtgctgatggtcaccagccggccgcctttgaatacggcgatgcgatcgctcaggtgcaacagttccggcgcttctgacgagaccacgatggcggcgccgccagcgcgcacgaactggtcgagcaggtgatagatctcctgcttggcgccctcatcaatgccgcgcgtaggctcgtcgcagagcaagcacaccggctcggtggacaggcatttggcgagcaccactttctgttggttgccgccgctcatggaggccactggcagctccaaagaggaggtcttgatctgcaggcgtttgaccatgtcctgggcgagccgggtttccttgcgcgcgttgatcagcgaccagctggaaagacgcttgtaagccgacagcgcaatgttggaaagaatgctgccggtgagcaccagtccgctgtctttgcggtcctcggtcaccagtgacatgccggcatcgatcgtggctttgggctggccaatgggcatgggtttgccttgcagggtcacgctgccggagtctgcgacggtcaggccgtaaatgcagttgagaaactcgctgcggcccgagcccatcagcccatagatgccgaggatttcgccctggcgcagttgcaggctgatgtcgtggaactcgccgttgcggctcaggttgtcgacttgcaggcaagtgttggcggcgcattcgcggccgaccttgtggtcgatgcgcgtcagttcctgaccgacgatgccgcgcaccagatggttgcggtcgatgtcggccatgcgcccgctttccacaaaggcaccgtcacggaagatgctgtagtcgtcggcgatctgcgccagttcgctgaggcggtgcgacacgtaaacaatgcccgcgccgcgagcggtgaggcggcggatggctttgaacaaggtctcggcttcgcgctcaccgatggccgacgtgggttcgtccatgatcatcacctggcagtcgtggctgaatgccttggcaatttccaccaattggatctgcgccacgctcaggcggtgcatcgggctggtggcgtcgacgtcgaattccaggctttcgagcagttcgcgagtgcggcggttgagggtcttgctgtcgacaatgcagcctgcgcggcgcggttcgcggcccagccaaatgttttcggcgacggtcatgtagggaatgggttccagctcctgggtgatcatcgcgatccccgccgccagggcgtcactcgggcggttgaactgcacgggtgcgccgttgagcacaatgctgccggcgtcacgctgggtgatgcccatcaggatgctcaggaaagtcgatttgcctgcgccattgccgccgcataacgcgtggacgctgccggcccgcagagagaggcgcccgtcacgcagggcgggtaccccggcgtaagccttggcgacgtgttcagcctggagcagtaatggcgtggccatcggcgtgtcctcgtgctgtgaattcttattaggtcgcacagtcatgtttcgctgtgagcatatgtgtaccaaatgaaattctgatcagtcaatctctttaatgtaaatgatgcgattctcatctaaaggccgaaatatgcctgattagagggctttgactgccgggtcagttaaaagctgcttgacacgaagggctgaatacacgagaaatgtctgagcggaatttcacttgacgatcaaatgatcagtcaaaaagcagatcacggcagcggagccagacgccatgaacacacctttcccggtggctatcggatgcgatgaagcgggttttgagctcaaagagctgttgaagcgccatatcgaggcgctgggttacccggtgaccgacttcggcacccattccaccgcgccggtgctctacccggacatcgccctggccgtggccaatgcgattaacgccgggcagcaacgcctgggcgtgctggtgtgtggcaccgggatcggtatggcgatttcggccaacaaggtgctgggcattcgtgcggcgcaggcccacgacacctattcggcagagcgtgcgcgcaaaagtaacgatgcgcagattttgtccatcggtgcgcgggtgatcggcgccgagctggccaaaagcatcgtcaagtcgttcctcgaatcggagttcgaagctgcgcgctccggggccaaggtcgaccgtatcaacgcgattgagcgtgacgggcatcagtagtggacggaacggggcaagagtcgggagaatgcgcctttgacgccgaaacggaagcccgtccccatgagtgacagtacccagcgcattgccagtgatatcgatcaaatgaccgaagtggcgatgctctattaccttgagaacgtcactcaggaagccattgccaagcgctttgacctgtcacgcgcgaaagtcagccgcttgctcaagcgtgcgcgcgatgaagggattgtcgaggtgcgcgtgttgcagcacccggcgatgaataacgaactggagcgcgcgctagtggagcgtttcaagctcgaccgcgcattgattgcggtcgaccacagcgagcccgacacccagcgctcggccgtcgccagcctggtggcgaattacctgaacaaaaccctgggcgacggcatgattgtcgccgtgggcatgggacgtaatgttggtgcggtcgccgataacgtgtttttgccggtgacgcgcaattgcacgtttgtatgcgccatcggcggttcgctcaaggcgggcgaatacatgaacccggaccatatctgccggcgcctggccctgcgttttggcggtgagagtgaaagcctgtacgcgccggcactggtggccaacccggagctgcgcggcgtactgatcaataacgacaccgtgcgttcgaccctggaccgtgctcggcgggcggacatcgcgttgattggtattggcgacatgagtgaaaacagcaacatggtgcgcatgggctggttctcaccgcaggaaatcgcccaggcacggttatccggcacggtgggtgacatgatggggtatgacttcatcgatattcacgggcagccggcggtcaacgcgattcaggggcgggtgatcgggctgacggtgcaggagctgtttcggattccggatgtggtggccatagccagtgagaacaccaaagcggcggcgacactgggggcgttgaggtcgggggtgatcaatactcttgcaaccacagtgacgaatgcacacaccatcctggcgctggatgatgcgacgcgaaagtcctgacactgcacaggtcgaccctgcagagcaggccactgtgggagctggcttgcctgcgatgcaggcagctcggtctgtcagtaaaaccgaggtgatgctatcgcaggcaagccagctcccacacaagtgatgtgtcgagttctacagatcttgtaatagttttacgttgtgggaaatgtgactctcggctgtacgattcaagtccttttcccatcacaggacttacatgaacaccctctcggagcctcccagtcgtctttccccaagacaaccgctgctgctgttccctctgaagcaccccgtatttcgcctgctaaccttgtcccggcccactgaccgcgcattgccgtgcccggcattctgaacaccgataaagagactctataaatggaatggttagcggatccaacggcctggctcggcctgttgaccttgattgtgctggaactggtgctgggcatcgataacctggtgtttatcgcaattttggcggacaagctgccgccgcaccaacgcgaccgtgcgcggttgatcggtttgtccctggccttgctgatgcgcttgggcctgttggcgagtatttcctggctggtgacgctcacgcagcccctgttcgaggtgttcgacaagagcttctcgggccgcgacttgatcatgctgtttggtggtgtgttcctgttgttcaaggccaccatggagttgcacgaacggcttgaaggccatgtggcccagcgcacgggcaatgccgcctatgcgatgttctggccgatcgttgcgcagattgtggtgctcgacgccgtgttctccctcgacgcggtgattaccgccgtgggcatggtggacgagctggcggtgatgatgatcgcggtgatcgtgtccattggtgtgatgattgtggccagcaagccgctgacccgtttcgtcaacgcgcacccgacggtgatcatgctgtgcctgggcttcttgatgatgatcggtttcgccctgaccgccgaaggcctgggtttccatattcccaagggctacctgtacgcggcgatcggtttctcgatcctcatcgagctgttcaaccagattgcccgggcccgtcgcaagaagtcggcgcagggcaccttgccggtgcgtcagcgcacagcccacgcggtgatgcgcttgctgggtggtcgcagcctggcggtggagggcgtggatgacgaggtggccgatttgctcggcgagccggacgccaaccagggcccgctgtttgaccgacgtgaacgcgtgatgatcagtggtgtgctgcaactggccgagcggccgattcgcacactgatgacgccacgggccaaggttgattgcattgatctggcagacgacgctgagacgattcgcctgaaactgatgcattcgtcctactcgcggttgccgttgatccgtaacggcgcggtcgatgagccgctgggcttcgtgcataaaaaggaactgctcaaggaatacctggccggtaacgaacctaatcttgagcacttggcacgccgtgcgatcaacctgctggagagtttttcggtgctcaacgcgctggagcagatgcgtcaggaatcgacccatattgcgtttgtgatcaacgaattcggcgacttcatgggcgtgttgagcatgaccgacatcctcgagtccatcgccggagagttgccggacgccagtgagatcgaagggccggacattgaggaggaggcgggcgggttccgcgccaacggtgccttgaacctgaaccagattcgccagcgcaccggttttcaagcgccagctaccgaggattaccagaccctggcgggcctggtgatgagcctgttggaccgcctgcccgtggtcggtgacagcctggagcatgcgggctggcgcctgacggtggcggcggtggaagagcggcgggtgacccaggtattactggtgcccatcgccccgtgaagcctgagcctgcggtaatccggagtcgggtcaccgcaggcttcttacaagtaaagataggcaggaagtactgggagtggcgtgccgttgaggtagtgggagaaaattcccttcaggtactcttcctgatcttcctgaaagccgatccccaagaacctttgtatttcctcgccatttcggtataccaacagggtcggtgttccgatgtcgcccagtgcctcgattctcggggtttgtctggtatccagggtgatgcttttggcctcgccggcatgtgcttcgctgatgcgctcaaagcgtttgttggcgccttggcacgcttcgcagtattcggaaacaaacagcacaaataaccactgatgctgttttacgatcgcccaatactcgtctggatgatcgatgaccgtatttgccaaccccatgatgatctccttgtgtacccggcaacaggttgctgccaggtacgctaaatccgcagatcacccgcgtctactgtcaacctttacaggtccgctgcctcacgctccacccgctcccgggccttgcgtgcctggctcgcacacttcctgtattcctcattgtcccgggacgccttggccttgcgataaccgtgatggttctggctggtgtagtcggtgctgtaggcctctttaagcttttgcagttcttctttgcattcgcgccggtcgttagtggccgaggcgttgccggccagcaaaaaggcgagcaaaagcagcagagggctgagtttcatcgggggcgggatccttgtcggcgttgatgtgccaaggctagtccagcgcgaggatttttccatgtgggcgggtgcaccccaatggtgcgtggtaacacggttgtggcgcaccgcgttggcgctgtcaccggggtgtggggcccaaggtagcaatcggctgcgcagtgctggcgcaacgccttatctcgctattgtctttatctaattgatttataacgaatttatccctgtcatatttttctgctagcgcgtgtggcacactttctgctgtctattccgttgttacatactaagttccggtatagcggaatacacaactcctggagtgcttgtcatgcatcaccgaccttccgtgtttaaagcgtgtgtttttctcttcgccgcatcggcttccctcgcaagcgtagtgcacgcggcggacagcaagctcgatgatgtgctcaagcgtgggcacctgatcgtgggtacaggcagtaccaatgcgccgtggcacttccagggagcggatggcaagttgcagggttttgatatcgacatcggccgcattgtggccaaagggttgttcaacgacccgagcaaagtcgagtttgtggtgcagtcgtccgatgcacgtattcccaacctgctgaccgacaaggtcgacatgagttgccagttcatcaccgtcaccgccagccgtgcacagcaagttgcctttaccttgccgtactaccgtgaaggcgtgggcctgctgttgccgatcaacagcaagtacaaagaaattgaagacctgcaagccgccggcgacggcgtcaccgtagccgtactgcagaacgtgtatgccgaggaactggtgcaccaggccctgcccaaggccaaggttgaccagtacgacagcgtcgacctgatgtaccaggccgtgaactccggccgtgccgacgccgctgccaccgaccaatcctcggtcaagtacctgatggtgcagaaccctggccgctaccgcagcccgacctacgcctggagcccgcaaacctatgcgtgcgccgtcaagcgtggcgaccaggactggctgaacttcgtcaacaccgcactgcatgaagccatgaccggtgtggagttcccgacctacaaagcttcgttcaagcaatggttcggtgtggacctgccagaacctgcgatcggtttccctgttgaattcaagtgatgtgtaaaccgggggcgcagcgtgttgcgccccgctttaggtactgccgaccatgaactatcagttgaactttgccgccgtgtggcgcgatttccccagcttgctggcggggctcggtctgggtcttgagctggccctgctgtcaatcgcgattggctgcgtgatcggcctgatgatggcgtttgccatgctgtccaaacaccgtgcgttgcgtgtgctcgcttcggtgtatgtgacggtgatccgcaacacgccgatcctcgtgctgatcctgttgatctacttcgcactgcccacgctcggggtgcgcctcgacaaaatcccctcgttcatcatcaccctgtcgttgtacgccggtgcttacctgaccgaagtgttccgcgccgggctgttgaatattcccaaggggttgcgtgaagccggcctggccattggcctgggcgagtggcgcatccgtgcgtacatcaccgtgccggtgatgctgcgcaacgtgctgccggcgttgtcgaacaacttcatttcgctgttcaaggacacctcgctggccgccgcaatcgcggtgccggagctgacctattacgcccgcaagatcaacgtcgaaagctaccgggtgattgaaacctggatggtcacgaccgcgctctacgtggctgcctgttacctcattgccatgctgctccgttacctggaacagcgtctggcgatccgtcgttaaggagggtgtccatgtacgagtcccccagctggttgcatgagttgtggatcgcccgggataccctgtgggcgggctttcaaaccagtgtgtatgtctctgcgctggccattgttttcggcacgttgattggcattgttgccgggttgatcctgacctatggcaagttctggatgcgtgcgccgtttcgcctgtatgtcgatttgatccgtggtacgccggtgttcgtgctggtgctcgcctgtttttacatgctgccggcgctcggttggcaaatcaccgcgttccaggctggtgcggtcgggctgacgctgttttgcggttcgcacatttcggaaattgtacgcggcgcgctgcaagccattccccgtgggcaattggaagcgggcaaggcgattggcctgacgttctaccagtccctgggttatgtgctgttgcctcaggcgctgcgccagatcctgccgacctgggtcaactcgtccaccgaaatcgtcaaggcctcgaccttgctctcggtgatcggtgtggccgagttgctgctcagttcccagcaagtgatcgcacgcaacttcatgaccctgcagttctacctgttcgccgggtttctgttctttgtcatcaactacgccatcgaattattcgggcgctacattgaaaagcgggtggctttgccatgaaccaacctcaaaaagaacaaccgctgctgaatattcgcggcctgcgcaaacaatacggccaggtcgaagtgctcaagggcgtcgacctgtccatgcagcgcggcaacgtggtgaccttgatcggctccagcggctcgggcaagaccaccttgttgcggtgcgtcaacctgctggaagaattccagggcgggcagattaccctcgacggtgaatccatcggttacagcgaaatcgccggcaagcgggtgcgtcaccccgagcgcgtgatctcccagcaccgcgcgatgaccggtatggcgttccagcaattcaacctgtttccgcacctgaccgccttgcagaacgtcaccctcggcctgctcaaggtcaagaaaatgggcaaggacgaagccgtggcgctggccgaaaaatggctggaccgcgtgggcttgctggaacgtcgcaatcactttccgggccagctgtctggcggccagcaacagcgtgtggcgattgcccgcgccattgccatgaaccccagcctgatgctgtttgacgaagtcacctcggccctcgacccggagctggtgggggaggtgctcagcgtgatcaagggcctggcggaagaggggatgaccatgttgctggtcacccacgaaatgcgctttgcctatgaagtgtccgacaagatcgtgttcatgaaccagggccgcattgaagagcagggctcctcgaaggacatcttcgaacgcccgcaatcgccgcgcctggcggaatttttgaaaaatattcgtttttaatcaggagttatttttatgagcattactcgttacggcgccggcagcaccgccggtggtggccagcctcgtcctttcgcccgcgcggtggaagcggatggctggctctacgtgtcgggccaggtgccggccgtggacggtgaaatcatcaccggcggcatcatcgaacaaacccgccagaccatgcgcaacgtggtggcgatcctcgaagaagccggctacgaactcaaagacgtggtgcgcgtgggcgtttggctggaagacccgcgtgacttctggagtttcaacaaggtcttcggtgaatacttcaccccggaacacgccccggcgcgcgcctgtgtgcaggccaacatgatggtcgattgcaaggtggagattgattgcgtggcttacaagaaaaaaggctaaatgcagcgaccttaagaccactcaaaatccaatgtgggagctggcttgcctgcgatagcggagtgccaggcagccaatgtgtaactgaaccgccgccatcgcgggcaagcccgctcccacagggttcgctgtgcagcatacaactatgaccggaccgacactgccatgaccgaagacaccatcaaacgccgcgccaaaggactggaccgtgcattcgatatcctcgattttctcaaggaaattggccagcccctgcgcccgaatgatattgccagcggcatcggcagccccaagtccacggtctacgaagtggtggcgtcgctgcttgagcggcgcatcctggaaaccgtgggcaaggacggtcacgtctacctcggtcgccagctctacttcctcggccaagcccacttgcgccatttcgatctgacccgcgaggccgatttcgccttgcaggaaatcgtcagccaaacccacgaaaccgcgcagatgtgcctgctcaacgggcgcaaatacacggtggcgctgatgcgcgaaggcgagcggcatttccgtatttcctccgacatcggcgaaaacgcacccatcccctggaccgcctccgggcgcctgctgctggggcacttgagcgatcagcagatcatcgacctgatcgaccacgacgacttcatcctgccggatggccagcgcttgccgctggaaaccttcctggcgcaaatccgtcaggccaccctcgatggcttcttttccttcgacagcgtggccgacacctttacccattgcttcgccgccccggtacgggacgcgcacggcatcagcattgcgaccttgtgcatcgtcgcgccgcgcgccgatgcgatcaaaaactacaacgactatcgccgggtgttgatcgacagcgccaacaacctggcccggcgcatcaacgaataggagttttccatgtctgcccacaatgccgttgaaaaaggcgccgccgccgttggcgcgcacctggttcgtgacgtcagcctgccggccctggtgctgcaccgcgacgccctggagcacaacattcgctggatgcagggcttcgtcagcaagagcggcgccgagcttgcgccccatggcaaaaccagcatgatgccggcgctgtttcagcgccagatcgaggcgggcgcctggggcatcaccctggccaacgccgtacagacccgcgccgcctatgccggggggattcgccgcgtgttgatggccaaccagttggtcggcgcgccgaacatggcgctgattgccgacttgctggccgacaaggattttgacttccactgcatggtcgatcacccggacaacgtcgccgacctgggcctgttcttcgccgcccgcggcctgcgcctgaacgtgatgatcgagtacggcgtggtcggcggccgttgcggttgccgcagcgagcaggaagtgcgcgacctggccaaagcgatcaaggcccagccggccttggccctcaccggcatcgaaggctacgaaggcgtgatccacggcgagcacgccatcagcggcatccgcgcgttcgccgcgagcctggtgagtttggcagtggacctgcaaaacaacggtgcttttgacctgcccaagccgatcgtcacggcttcaggttcggcctggtatgacttgatcgccgaatcgttcgaagagcaaaacgccgccggccgcttcctcagcgtgttgcgcccgggcagctatgtagcgcacgaccacggcatctataaagaggcgcaatgctgcgtgctcgaccgccgcagcgacctcaatgaaggcttgcgccctgcgctggaagtctgggcccatgtgcaatcgttgcccgagcctggcttcgcggtgatcgcgttgggcaagcgcgacgtggcctacgacgctggcttgccggtgccactcaagcgctacaaggcgggtatcgtggcggctcaaggcgatgacgtgaccgcgtgcaaggtcacggcggtgatggaccaacatgcgttcatgaccgtggcgccaggggttgagctgcgtatcggcgacattatttcctttggcacctcgcacccgtgcctgacctttgacaagtggcaggtgggttgcctggtggatgagcagttgcaggtggttgagtctctgcatacctgcttctaaaccgtgtcgcggccatcgcaggcaagccagctcccacattttgaattgtaaatactttcaactgtgggagctggcttgcctgcgatggggccctaaagaacacccgagacaacagccatgaccacccaaccccgcatcgccctcatcggcgaatgcatgattgaactgcaacaccgcgccgacggcagcctgcaccaaagcttcggcggcgacaccctgaacaccgcggtgtacctgcgccgcgagctgggcgacaccggcagcgtcgactacgtcaccgccctgggcgatgaccgtttcagcgatgccatgtgccagcaatggaccgacgagggcctgggcctcggcatggtccagcgtctggccgggcgcttgcctggtttgtactgcatccagaccgacgccaacggcgaacgcaaatttctgtactggcgcaacgaagcggcggtgcgcgactgcttcactacgcctgccgccgagccgatcctggcggcgttgccgggttacgacgtggtgtatttcagtggcattaccttggcagtgttgggtgaagttggccgcgagcgcttgctgaagaccttgattgaaacccggcggcgtggcggcaaggtggtgttcgacaacaactaccggccacgcctgtgggccagtatcgaagccgcgcgcgcggcgtatcacagcgttatggccgaggtggatatcgccttgctgaccgaggacgacgagcgtgcgttgtttggctatgcagacagcgagcaggtgttcgcggcctacccggcgattgccgaagtggtgctcaagcgtggggcggatgcgtgtttgatccgctgtgatggtcagcggttcagcgtacccgcgctgaaggtcgacaaggtgatcgacaccacggcagcgggggattcattcagtgcggcttacctggccagccgccttaaaaagggctcgtcggagcacgccgcactggccgggcaccagttggccagccaggttattcaggtgcccggcgcattgattccccgtaccgtttgatcctgttggaaaacatacctgagcaggtcgttggcacgttattcaaaacgcgcgatccgttcaggtactgacccaggagtgttccatgccgatttccaccggggccctctcggcaaacgggaagtagtgttcggcgactttggtcaagtgacctgcgtagacggtgtcatagacatcgtattgcgtcagagaaccttcgtcatcggcgaggttgaatatcgtactgtagtaatccggtcgctctctggccaatacatcattaaagacttgaggccctgttaatcggaagagttcggtggagtatgtcttgaactccggggaggattgatcggtcaactgtggcctgggttgtttgaaaaagtccgggttggcatcgcatcggcgggtcatttcttgcgtgacgctggccagtaccggattattcgggaggctagcaaaaatgctgctgttgtagcctctaaagtccgcaccataatgattgaccagcgggcctaataacacgtcgttgcctgccgccatgaatgcctgttcacctattgtcgttgaaaagctgtcgtccacgtccatgtaaattccaccgtagtgattggtgagtgggtaacgcaacatatcggatgcggcagaatagttgggcacccctgcggtgcaggcgctcaggtagtgtttgtaaatgtcggtgcgttggaactgatcaaaaaagggagtgcctttcaactgcgcgatcgttacgttaggggcgacttcactgagtgcgttcgctaacgtggtaaacagctcatcattgacatcggtgtgcagggttaccctgaagtcggcagtatttgtagtgttacgggcgatcgtatccataatgttttgattgggcactgatgtgcctatccataggtgatggatctgccgtgggatttcctgagtgtcgacgggcaaaagcgggtagctgggcagggtgatatcgcgaaattgagtggggcgtggaaacgtttcttttatcgatagccagtgagaataggagccactgcgccaggtgttttcctttacaagccagacgaccatctccccactcatgctggttctccagacttcttgctgaacatcgtaaaagactctgaacaggtagccatactccgtttgaatagtatttacgccgtagtaggtgatcactggcacctttaccgtataggtgggcgctggtggttgaaggcgagtagcggggagtgcgcaggcattttcaggattcagcatgttatggcccaccgatgtgtggattgattgaacgtcacataagggccgtggtgcgtgtttttgtagatctgaaaatgctcatcgccaggcagtttgcgcacagcaaagatgttgccttgaagatagatatacatggcgccgttttttgaaaaaacgtgctccactgcggacacgtccgataggtcgatgtgtgaagactgaagtttcatttgttgttgtatatccagttgcccagccgtggcggtggtatcgggcctgaaaaaggcaacactgccctgcgacgaacgactgggcagtgaccctggatcgaaggactggacaggccggtaatcaatgggtggcagaaaacgtggctggatacctttgaacaacgcagtgtcgccggtcatttccgtgcgtgcgaacttcaataagtacttcagaccgagcaagcctttgtgcccaatttggaacagcaaggtcaacgcactgacggggttggcagcatttaacgagcgcaacaagacgctgggtaacgcgctgtgcagtggctgtatcgctttggcgacagtcaccgctgttttcgtaaagttcagtgatttggaaagtatgatcactcgccccaggcgtatggagatgctcagcgccttgatgccgatgcccacaaagggcaacaagacactgactatttcgagggcagacgtgataattgtaccgagtgttactttgcctgattttatatcttgatacagcgcatacccgggcagtacaaaactggccatcaactgagcccgtgcaaatagtcgctctttgtgggcttcataggcggtcgggcttttcaagccttgatacacaagttccattatgttgctgaatacggagtcgaccattttctgacacagaaactggatcttgtgttctcgggacatctcgcgggtttggcgctggaccgtgtaaaaactgaccatcaggtaaggcgcgctgtgttgttgacccgggattcctctgagataggccccctcgtccagcggtggaacatacaggtagggcgattcatgccagagcgcatccgctgtcgggggagaggacgttaggttaatgcgcgtggggctcgtggcggtgagtggcagcggcctgatggtccctgacgggcaaaaaatctcataagcgtattgcacgctctcgctctccttatagagcgcgatcagcccaaagtggctttcttcccaggcgttctggctgttcttgaaccacaccctgatgtatttgtaggcattgagtatccggtttctatccaggctggggaggccgtgcaacgctgacaccagacgggatgtcatgcccgagaggaagctttccttgtacgtggcaaatttcgcgtcgaagcgtgcttgcaatgaacacgcaccttgggggtagggctttagtccaagctcctgttcggtgaagccgacaccggaaacgcaggacatgtatttttccagcagggtcatcctcatgcgtcgcccgatgtgcctatccgccgccagcatgggatgaacgtggaagtattttttcaattcatcttctgtaaacggtatgacgcgctcggcatccacgcccgggtgggttttttcaaactcagtgcgggccatgtctttacgtcgaggcggtttctgaaccaaatgggtaaaggtttgagcgtcgagcgcctcttgctcggtgatgtaagcaatggctttaagactgtcgtcgtgtgagaccgatgcaatgtcggtttcactgatcaccccttggcacatggaaaagtgcagcgcgggaagctgtttcagaagggcaatcgctatttttttgctttcactgaatgccgtgtattcaagttttgcgtaggcggtggcgatgtcgagataactcaaaccattggaagaacacggggatgtcgcctccatgcaggcgaccgcgtggcgaaagtgaacactttcaagggtctggccatacagcagagcatccgggatgttgacgactaataattccggcgcatagcgtgcgctgagcaatgtaaaaaccactatttggctcgcacggtccgtgctgccgggaaagcgtgttttgaggtgttcagccagcgcatcgcgcacggcgttgacggacatttcgcctgatcgaacgttgttaaggttcatgccacagatgtaacccggctgttgttctgagggggggtacaggtagtcggtgatcacagagacggcaagggctcttgatgcgctggcaggctgtgtttgagcggaagcgggggcatgtttcatcagcacttcgcccaactgatgaagcctgggcaggtcaagaagcatctcgtgaaagtgcgaataaacagttggcggtttgtccggggggatgggcgccgacatagagttaaccagcaggccggcattcaagtagttcgccagcgcgtgtacatcgactgcggctgcggtggctttgatttcgtcacgtaaaacggataccaacgctgcggatcggccttgtgccgtggtcaactcacgcgatgaataataaggatgggtctgttcctgtggcttcttgtgtatacccagaagcctgaggcctgcactgtctgcctgggcgtgtgtgtagggggttggcagcgtctgcgtgtgttgttggaagtagtaaaagttgtgccgaaagctgccgggggactgccaggccaatcccagaaggttttcccgatgctcagtgatgcgttgcaggacaagtgcactcagggcgacggtgacgggcgtatcagcgggtaaatagggactcaggttattcaaaatgcctttaacgatactgatcacgccctgcgagttcagcttcttgagcatcaagtctctgcacgcaccatcgctgaggggcgcggcgttgaattcggaaaatacaaacggtgatgcggtcaggtcgctttttgagcagtcattgttgagcggcgtcatggacagggctaaagcctcagagagcactttgcctggaagttgctcaagcactcttgtctggcgtaaccctatgagtgagtcatgtttgttatgaagggttgaggccagacagggatcgagagcgctgcaaaatgtgtcgagcccttgatgcagtgaggttctttttgcgtaatcaaaatggagcaggaaatcgtccagttgctgcttcagcaaatcgtcaaccatgtggtcaatgagtgctgatgtcacttgagtctttttcaggcccaaccgagcgggttgtttcgtatatagctcaagaacgaaggcggcgcttttcctgcccagacgctccagcagcttttgacattgctcatcgtcttccatctgcgccagcaggtgctgttcgaatgcgctccagctttcaaattcctccgcgcctgtctccagggtaaacacaacaagcgcgccgcgctgctctggcgcggcgtttggtttcagcacaaacgctccgttgaacggaaatacccggccattggatcggtcgaagaagccacaggtataagtctcgacatgactggccgccgttggctgactgagtacccgatttatcagtgtgtagctgtaaagtgtgagtgagccatctgccagcctgacgcgggcttcggtttctatgtagtgcttgaggtggttgacccagatagttttggcaccggcatcagtggacacgggttcccaatacctgtcgacatcctgtttataaagggatgagaggttatcaagccgcctcagaaagtcgtcgaatgcgctgaggctgacaggtacgaacgggtggagcttaaaatcactgtaattgatgggtgagctcttcagcaggtcttcagggttgacccggtcggtgccgtcttcggtcctgacgcttgcgtcctcatagacggaaatctgcatcgacgtccacgttgtgcccgcttgttcatgggggcggcgaccggtgagcaaatagtccttgaccagcgcggcaatggagcgtgtgtaggtgagggcggtgctgcctgctggcacggcatccacaaagccatgaacgattgccgaatagaagatggcgttcgaggcagcattcaacggcgcgctgatgaagcgggtaatctcttgctgcatccggtgggagaagcgcggttggttttccagaatgcccagtgggtcctggcgattcaggctcagcgcattcagttcaagtttctggaacccgcgaaggcggtaggcgtcgatcagggtggcaatcagctcacaggcgctggcccccagcgggtaatcctcgctcttcaggtcttcactgtttttgaacgtatctttgaaacgttgcctcgtcgtgctgtcgaggatcaccgtcggataagtcagcgcaggaaggtcctgctgccatatcgcggcagccatcttgtagaggaactccagcgacagcgcgaaggtgagcttctcaacggggatattcactgctttggagagcaggcttcgaaacgggccgaacctgcacagcccaggcaaggcgttcgcgtcgttccaatccagcgttttataaaagtcgctcgcgcgcaatgcagccgtattggcatcactcaggaagtggcggaaaaattgccgcgcctggtcgccgggtaattctgctgcgtcttgaatgtgtaacgcgtgcagcgcgctgctgatactcgattgttgtattttggtgaggtccacagccatcatccctggtccatatgtcagggctcaaggtagggggcgtgggcacgtagcaggcggtacttatgtcatgttgcaggcgtgtgggcgcgcgtgaccggtaataaacgccagggtgtcaatcccggtaaaacacttgcaccaggtgatacccgaatttgcttttgatcggaccatgcacaacgcgcagcggttttttgaatatcacagcgtcaatcgccccgaccatctgccctggccgaatctcgcccagatcgccgccacgtttgctcgaggggcaggtggagtactttttggccagcacgtcaaaggcttcacccttggcgatgcgctgcttgagttgttcggcttcttcactggttttcaccaggatgtgacgggcttgggctttcatgttgttaccttgcaacggtcaaacggaagggcgcgcgattatgcctgaactcattcgacgacgttgatcatgctgcggatttttgtcgccagcaggtcaatggaaaacggcttggcgaccatgtccatgccttcctcgaggaaaccctggcgctcggcggctttctcggcataaccggtcatgaacaacacgcgcaggccagggcggtgctggcgggcgatctctgccagttggcggccattcatgcccggcaggccgacgtcggtgaccagcaagtccacacgcaaatccgactccagcaacggcagcgccgtacgcgcatcggcggcctggtgcgcggtgtagcccagttcatcgagcacattgaccaccagcatgcgcaccgcggggtcatcctcgactaccacaaccgcttcgccggccaaggccagcggtgcttcgcccaaatgggttggagcgctgctttccagcgcggtgccatacaaccgcggcaaatacaggcgcacgcacgtgccttggccgggttcgctctgaatcgttacatggccgccggattgctgggcaaacccgtagatcatcgacaatccaaggccggtgccctggccgatcggcttggtggtgaagaacgggtcgaacgccttggcgagaattttcggcgccatgccggtgccgttgtcgcacacgccgagcatcacatagtcgccggccttgaccggttcgagggtggtgatgtcggtgccgtccaggtagctgttggcggtttcaatcaggatttcgccgccgtcgggcatggcgtcgcgggcgttgatcaccaggttgagcagggcgttttccaactggctggcatcggtgttgaccggccagatatcctggcccagttgcaccttgagcccaatgtgcgcgccttttgtgcgccggaacaggtcttcaagtgacgccaccaactggttcgggtccagagggcgccggtccagtgactggcgccgcgagaaggccagcaaccggtgggtgagggcggctgcgcgatgggcggaggacaccgcggcgtcggtaaaccggccgatttcatcgctgcgcccggcggcgatgtagcgctgcatcaaatccaggctgccgatgatgccggtgagcatattgttgaagtcatgggcgatgccgccggtgagctggccaaccgcttccatcttctgcgcatggcgcaaggcatcttcggcgcgctcacgttcgaacatctcgttctgcaggcgctggttggcttcggccaatgcctgggtgcgctgggccacgcgttcttcaaggttttcgttgaggtggcgcagggcttcttcagtgagtttgcgttcggtttcatcaatcacaaagatgtagaaaccattcaccgcgccgtcgttgctgaagcgcggcaggtacttcatcagcgcatggcgcgggcggccgtcgcggtgcggggtcatggtcatgaaactgcaggccttgcccttgagcgcggcggtgatcttgtctgcgcgcccggcatacacttcgtcgccgagtacttcgcgaatggtcttgccgtacagctcctggggcgtcatgccgtaccagtccaggtaggcgctgttgttcaggcgaaaacgctgctcatggtcaacgtagctgatcagtaccggcatggcgttgatgatcagttgcagttcggtctggctttggcgcaaggcctgctcggtgtgtttgcgctcggtgaggtccagtgccgcgccgaggaagcgtgccgggcggccttgcgcgtccttgtagcagcggccccgggcaaatacccagcgtatctggccgtcggcttgcagcaggcggtattcctcggcgtactcggtgccgaaggtgatgcagtgcttgatgctgcgcgccaccatgccgcggtcttcagggtgcacgccttgcaggtagtcgctgatgggcaagaggccggcatcgccggggtccacgccgtgcaggtaggcgaagtgggcgtcggcgataaagcggtcttcgccgatatcccagtcccaggtgcccacggcgtcggtcgccgccagtgccagttgcaagcgttgttcggtgttgtgctgggccttgaggctgtcttcggagcgctgttgcagttcgagcgccttgctgcgccgctcgttggtttcgatggcggtgaccaggatgccggccacgtttgcgctttcatcgcggatcgggctgtaggtcaggtcgagccagatttcagtgtcgcgatgatcgcgttgcagcacgaagcgctgctcgctgaagctgcgcacctgcccgccgagcaccgcgtcgtagatcggcgcggtaaagctttccagctccggccaggtctgatgcgcgggttggccgagggcaccggggtgcttgttacccgcaagcttggcgaagccgtcgttatagagctgggtcagttggttgccccacaacagcagcatcggcatcggtgagtggatgacgatatccaccgcagtgcgcaggctttgcggccaatcattggcctcaccgagggggctgcgtgcccaatccagccgcgcgatcaaggcggcggcgctgccggtggatgttccattcatgaaaaagccctacgcgtaacactttgaaatatgacaaagactgattatcccgcgagtcgggaacggctgactacccctcggaaaatagcacgccttgggcttttgtcttcaaatgactgcgtcgaggctgaaacctttcatccatcagccagttcaggccggttgcgaaactgctccagtgcctgcgggtttgccagcgcgtcggtgtttttcaccggctcgccatgcactacgtttcgcactgccaattcgacgatcttgccgctgatggtgcgggggatatctgtgacagcgaggatctttgccggcacgtggcgcggcgtggtgctggcgcggatggtttggcgaatctgctgctccagggcgtcatccagttcgatgccatcgcccagccgcacaaacagcaccacccgcacgtcatcctgccagcgttggccgatggccaggctttccagcacctgcgggactttttccacttgccgataaatctccgccgtgccgatgcgcacgccgccggggttgagtaccgcgtcggagcgcccgtggatcaacaggctgccattgggccgttgttcggcgtaatcgccctgggcccacacgccgggaaactggctgaagtacgaggcgcgcagcttcttctggtccgggtcattccacagaccgatgggcatggccgggaaatgccgggtgcacaccagttcgcctttttccccgaccaatggctggcggttgtcgtcccacacttcgatggccatcgccaggctcttgcactgcatttcgccacgccgcaccggcagcaccgggttgccgatcacaaaacaggagacgatatcggtgccgcccgacatggaggacaggcatagctcgcccttgatctcgcggtacacgtaatcgtaactctgcggcgacagcggtgaaccggtggaaatcagccctttgaggctgcccaggtcatggctcaggcggggctgcagcccggccttttccagggtggcgaggaacttggggctggtaccgaacacgctgatgtgttcggcgtcgatcaggtcgatcaagcgctccgggcccgggtggaacggcgagccgtcatacaacaccgctgtagcgccgagggccagtaccgagaccagccagttccacatcatccagccgcaggtggtgtagtagaacaggcaatcctcgcgggacaggtcagcgtgcagcccgtgttccttaaggtgggtgagcagcacgccgcccgtgccgtggatgatgcatttgggcacgccggtagtgccgctggaatagaggatgtacagcggatgattgaaaggcaccgggacgaactccggttcgccgccgggttggtaaaaattgtgccacagcacgatgtttgcccgggtttgataatcctcaatacgcgcctggggccgggcgtaaggcacgatgatcaagtgctgcagagagggcaggcgttcgagaatttcattgagcttggcgctctggtcgatgtccttgccggcgtagcggtaaccggcgcaggtgatcagcaccttgggttcgatctggccgaagcggtcgatgacgccctgggtgccaaaatccggcgaggagcacgaccagatggcgccaaggctggtggtggcgagcatgcccaccagggtttgccaggtgttgggcatgcaggcggcgacgcggtcaccctgggccacgcccgccgcgcgcaggcttttttgcaggcctgcaacgtgggcggccagttcggcgtaggtcagttgttcacgctggccgtcttcgctgatggcgaccacggcggggtgatcgtcgcgacggcgcagcaggtgttcggcaaaattcagggtggcgccggggaaccattgagcgcttggcatttcggcatcttcgatcaacacggcgctgggcggggtgtgaaatcgcacctcgaaaaaatcgacaatggctcgccagaaatccgggcgctggtcgatgctccactgatgcaaggcggggtagtcggccaattgcaggctgtggcgttcgttgatggaacggcggaactgatccatgcgcgtgttggcgatgcgttcgggggagggttgccagaggatgtcggacataagcaagtctcttgttcttaaacaaatctacctaacaacacacttctacattgtgggagctggcttgcctgcgatggcggtgtgtcagttggctaatgtgtctctgatacaccgtcatcgcaggcaagccagctcccacattcgatcgtctgtgtttgagctattgggccaaccagccgccatcaatattccacgccgcgccgcgtacctggctacccgcctcactgcacaaaaacagcaccagctcacccagctgcggcggcgtcacgaactccagcgacggctgcttttctgccagcaaatcatgctgcgcctgctgcgggtcaacaccgttggccgcgcggtcatcaatctgcttctgcaccagcggcgtcagcacccagcccgggcagatggcgttgcaggtcacgttgctggtcgctgtctccaggcccaccaccttggtcaagccgatcacgccatgcttggccgccacataggccgccttgcccaccgaaccgacctggccatgcaccgaggcgatattgacgatccgcccccaacccttggccttcatgcccggcaagctcaagcgcgtgctgtggaacaccgatgacaggttgatcgcaatgatcgagtcccagcgctcggccgggaagtcttccacggccgccacatgctggatgccggcattgttcaccagaatatccacgccgccgaactcgcgctcggcataggcaatcatgtcggcaatctgcgccgggtcgctgacgtccgccgggtggtggccaaccttgccgccgaaggcctgcacctgggcgatcaccgcgctggcgtcgccgaaaccgttgaggatcaaattcgcgccggcctttgccaggcttaacgcgatgcccaaaccgatgccgctggtggaacccgtcaccagggcggtcttgccgttcaatgtcgtcatgaaaacctcacacaatgccggtggcgtagaaagtaccaatcaccacgaacaccgcgagggtcttgatgatcgtgatgccgaaaatgtccttgtaggcttcgcggtgagtcaggccggtgaccgccagcagcgtgatcaccgcgccgttgtggggcagggtgtccatgccgccgctggccatggccgcgacccggtgcagcacttcaagggggatattggccgcatgggccgccgaaataaagctctcggacatcgccgccaaagcgatgctcatgccgcccgacgcagaaccagtgataccggcgagcagggtcacggtaatggcttcattgaccagcgggttgggaatgcccttgagccagtccgccagtaccagaaagcccggcaaggacgcgatcaccgcgccaaagccgtattccgatgcggtgttcatcgccgcgagcagcgcgccgctgaccgcacttttactgccttcggcgagcttgcttttgatcgcagaccagccaaacaccagcaccatgacgatgccgaccagcagcgcggcctgcaccgcccagatcgcggtgagcttggcgatctcggtggttaccggcgcgctcatgcccggcaaggccaggctgtgggttttgccgtaccactgcgggatccagtgggtgaacagcaggttcatcacacccaccagaatcagcggcgacaacgcgacccacgggttgggcagcgccaggttgtcggcggtttcgggttcgttgcgcaactcggtgccatagccttcacccgcacgctgggctttgttgcgctggcgcgccaggtacagcatgccggcgcagaacacgaaaatcgtgccgatcaaacccagccacggcgcggcccaggcggtggtgttgaagaaggtactcgggatgatgttctggatttgcggcgtgccgggcagggcgtccatggtgaacgaaaacgcgccgagggcgatggtcgccgggatcaggcgtttgggaatattgctctggcggaacatctcggccgcaaacgggtacaccgcgaacaccaccacaaacagcgacacgccgccataagtgagcagggcgcagaccaatacgatcaccagcatcgcctggcgggtgccgagcaagcggatggccgccgccacaatcgagcgggaaaagcccgacagctcgatcagcttgccgaacacggcgccgagcaggaacactgggaaatacagtttgatgaatccgaccattttctccatgaacaccccggtaaaggcaggtgcaacggcggaagggtcagtgagcaataccgcgccgagggcggcgatgggggcaaacaggataacgctatagccacggtaggcagccagcatcagcaacgcgagcgctgccagggcaatgatcacactcatggtgtgtctccagatcggattgttattgttgtgagggtggtgctttggggaggggctatagcgagatgtgtgccaaaactttaacttgttgaaatatatagaaaataattaagttttagccggcgatttcgatatttgtctctgatttgagacaaatgaaaatccagtgtgggagctggcttgcctgcgatggcggtctgtcagctacctataagcaggctggcagaccgccatcgcaggcaagccagctcccacattagattgtctattattcaggatctgtgtctctttattgagattgctcgatgcctaacgccaccatttttttgtacagcgtcgaccgacccaaccccaaccgcttggccgcctccaccacattcccctcacaccccgccaacgccgccttgatgatctgccgatcaaaccgctcccgcgccgcactgaagctttcgccttccacagacgccacggcactgcgttcaaccggcgtaaatgtaccaatcgccgcgcgaatgtcctcggcattcaacaccaggtcatcactcaacaacgccgcccgctccagcacattgcgcagttcgcggatattccccggccacgcatgttgagccagcagagccaatgcctcgcggtccagttcatgttcgctgcgtaattcctcaagaatcgcctcgctcaacgccggaatatcctccagccgctcgcgcaggggcggcacctggatcggcaacacattcagccggtaatacaaatccgcacgaaactcaccccgcttgatcgccgcttcaaggtccatggaggtggcggcaatcacccgcacatcgctgtgcagcatctcgttggagcccaccggctcgaactctttttcctgcaacacccgcagcagtttgctttgcagcgccagcggcatgtcaccgatttcgtctagaaacaacgtgccgccctgggcaatctggaattttccggggcggcccttgcggtcggcgccggtaaacgcgccaggcgcggtgccgaagaactcggcttcgagcaagtcgtgggggatggccgcactgttgatgctgacaaaggccttgtgtgctctgggtgacgcgccatgaattgcctgggcgagcaattccttgccggtgccggtttcgcccagcagcaacaccggcgactcggcgctcgcactgcgccgcgcacggcgtttgacttccaggctggcggcgctggtgccgataaagtgcgcaaagttgtatttgctctgccgcgaacgcagcagcgagcgggtggacgccagctcctgctgcaggctcaggtaacgttcgatcagcggcgacaaattgcgcaactcatcgaacaaggcaaagccgatggcgccaatcacccggccggcgtcgtcgtgaatcggcaggcgcatcaccaccagcgggcctttgggcgtgtcctggatatccagcagaatcggctgatcagtgcgcaccacctggcgcagcaggctgttggcgatcacctgttcgcagggttggccgatggcttcgtcggcgcttttcaagccaaaccgccgggcgtaacgctcgttcatccacacgatgttggcatcgcggtcgacaatcaccgtgccttcgctggactgctcgatgatctcgaacagcgactggatggccaggccacgaacctgttggtagtccttgaggctttcgctgatgttcatgcttatgccgccaacacaaatgtaggaatgggagtgcggtcctgtgggagctggcttgcctgcgatggcagtgtgcctgccagtaaattcggtactgatacaccgctatcgcaggcaagccagctcccacagatgctgcgtttacaagggaatatgcgcggccgccagcagctctttggtatacggatgctgcggcgtttcaaacacctcatggctggcgccgtgctccaccaccttgccgtccttgatcacgatcatatcgtgggccatggcccgcaccacggccaggtcatggctgataaacaggtaagtcaggccatacttttcctgaagctcacgcaacaatgccaccacttgtttctgcacggtgcggtcgagggctgaggtcggttcgtccagcaacatcaacgccggtttgagcaccagcgcgcgggcgatggcgatgcgttggcgctggccaccggaaaactcgtgggggtaacggtggcggctggcggggtcgaggcccacgtccttgagcacctgcaccacctgcgcatcgcggtccgccaggctgcacggcgcatgtacttccaggccttcgctgatgatctgctcgaccgtcatgcgcgggctgaggctgccgaacgggtcctggaacaccacctgcatctgtttgcgccacgggcgcatttgctggttgttcagtgggtcaagggcctcgccctgaaagcggatgctgcccgtggagtccagcaaacgcaggatcgcctggcccagggtggacttgcccgagccggactcgccgacaatccccagggttttgccgcgctgcacgctgaggctgatgccatccacggcgcgcaggtaggtcttgcgccgaaacagcccgcttgaaagggggaactgcaccgtcagatcatccacctgtaagacggtttcgcgcgggtcgctgcacaacacatcgcccgaaggctcggcgtccagcagcaaccggctataagggtgttgcggcgcctggaacagcgtctcgcacggcgcctgttcgacaatctccccggcacgcatcacacatacccgctgggcgatgctgcgcaccaggttcaggtcgtggctgatcagcagcagcgacatgcccaagcgttgttgcagggatttgagcaacagcaggatcttgcgctgcacggtgacgtcgagcgccgtggtgggctcgtccgcgatcagcaattccggctcgcaggccagcgccatggcgatcatcactcgctggcgctggccgccggacagctggtgcggatacgccttgagccgctcccggggtttctgaatgcccaccagttccaacaattcgaggatgcgtgcctgcgccgccttgccgcccaggcccttgtgcaccagcagggtttcgccgatctgtttttcgatgctgtgcagcgggttgagcgaggtcatcggttcctggaagatcatcgcaatgcggttgccgcgcaatttttgcagggtggacgccgaggctccgatcatctcctggccgcgatacttgatggagccggtggtatgtgtaccggcttcaggcagcagttgcaggaccgaatgagcggtcaccgacttgcccgaacccgactcacccaccagcgccagacactcgccggggcgcacgtccaggcacaggtttcgtacgacggtctggccgttgaaagcgacactgaggtcgcggatttcgatcaggttcataggccgtcactcatgagcgggggtcgaaggcgtcacgcaacgcctcgccgataaagaccagcagcgacaggatcagcgccagggtgaaaaaagccgtcaggcccagccacggcgcctgcaggttctgcttgccctgggcgatcagttcgcccagtgacgcgctgcctgcgggcatgccaaaaccgagaaagtccagggcgctgagggtggaaatcgctccggtcaagataaacggcaggtagctcagggtggcggtcatggcattgggcaggatatgccggcgaatgatcttgccatcgcccaggcccagggcccgcgcggccttgacgtattccaggttacgcccgcgcaggaactcggcgcgcaccacatccaccagcgccagccaggaaaacagcgccatgatgcccagcagccaccagaaattgggctcgacaaagcccgacaatatgatcagcaagtacagcaccggcaagcctgaccacacctcgaggatgcgctggccaagcaagtcgacccagccgccgtagtaaccctgcaaagcaccggccgcgatgccgatggcggcactgatcgcggtgagggccagcgcgaacagaatggagacccgcgcaccgaaaatcacccgcgccaacacatcccgcgactgatcatcggtgcccagccagttcaccgacgagggcgggctgggggcagggcggctcagctcgtaattgggcgtgtcgtcgctgaacgggatcggtgggaacagcatccagccgccgtcctgtttgatcaggttttgcacgtagtcactgcggtagtcggcctggaacggcagttgcccgccaaattcctgctcggtgtagcgcttgaacaccgggaaatacagctcgttcttgaagctcaataccaagggcttgtcattggcgatcagctcgccgcccaaggtcaggatgaacaggccgataaacagccacagcgaccaccagccacgacggttcttcttgaaccgctcgaaacgccgacgggctacgggggacagattcagcatcaggcgttcctcgcggcaaagtcgatacgcgggtccaccagggtgtagcagaggtcaccgatgagttttatcaagaggccgaacaacgtgaagataaacagcgagccaaacaccaccggatagtcccgcgataccgccgcttcgtagctcatgcggcccaggccatcgagtgaaaagatcacttcgatcagcagcgaaccggcaaagaacacgctgataaacgcctggggaatccccgagatcaccagcaacatcgcgttgcgaaacacatggccgtacagcacgcggcgttcgctcaagcctttggcgcgggcggtgaccacatattggcgggtgatttcattgaggaaggagtttttggtgaggatggtcagcgtggcaaagccgccgatgaccagcgcggtgaccggcaacacaaggtgccagaagtaatcggcaaccttgccgactgtgctcagttcgtcgaagttctccgaaaccaacccgcgcaccgggaaccagttcagtgaggtgccaccggcgaacaccacgatcaggaacatcgcaaacagaaacgccggcatcgcgtaaccaatgacgatggccgtgctgctccacacgtcaaagctgctgccgtggcgcacggccttgcgaatccccaaggggatcgacaccagataggtaatcagcgtggcccacaggcccagggaaatggtcaccggcatcttttccaggatcaggtcgatgaccgtcttgccgcgaaagaagctgttaccaaaatccagtttggcgtagctcttgagcatcagccacaagcgttccggcgcgggtttgtcgaagccgtattgtttttcgatgtctttgatcagcttggggtccaggcctcggctggcgcgtgagccactgctgatgccttcgccggaggaaccgccgacggcaccgctgccgatgccttgcaggtgggcgatggcctgttcgaccgggccgccgggcgcagcctgcacgatcacgaaattcaccagcaggatgatcaccagcgtcggaatgatcagcagcaggcgccgcacaatgtaagcaaacatcagcgtgcacctccgcgttttttcagctcagcgctcatttgttcgttcgtcagcggggtagggctgatttcccaccaggtttccagggcttcgtcgttcttggcctcgatggccgggcgaccgaagcggttccaccacgcggcggaggtgccgggcgggtagtagttgggaatccacaggtaattccattgcagcacgcggtccagggcatgggcgtaggtgagcatctgcgcctgggtgttggccttgaccaggccttttatcagtgtgtcgacggccgggtccttgagcaccatgtagttgttggcgcccgggtcgaatgcggcgtccgaaccgaaatagttgtacagctccatgcccggtgaggtggtgaccgggaagccgaccacgatcatgtcgtaatcgcgcgccatcatgcggtttacgtactgcgaagagtcgattcggcggatgttcagggtgatgccgatctgcgccaggttgcgtttgtagggcaacagcaggcgttcaaggccggcctgcgcattgaggaaggtgaactccagcggctcgccctcggcgttgaccagcttgtcgcccttgggtttccagccagcctgctccagcagggccaaggcttgcagctgtttgtcgcggaccatgccgctgccgtcggtgaccggcgccttgaacacctgggtgaatacctcgtcgggcacttggccgcgcaggggttcaagaatggccagttcttccggggttggcggttggctggccgccaacgggctgttggagaaaaagctctgctggcggatgtacatattgcgcatcatctgccggttggcccattcgaagtcccacagcatggccagggcctcgcgcacgcggcggtccttgaacatcggtttttgcacgttgaacacgtagccctgggccggttgcggcatctctttggccaggtgatcccgttgcaggcggccgtcgtccagcgccgggccgttgtagccgatggaataaccggtggcggaaaactcgcggttgaagtcgtaggcgccgccgcgcagcacctggcgcgccacttcggtgtcgccgaagtactcaaggctcaggtgatcgaagttgtacaggccacggctgacgggcaagtccttgccccaccagtccgggtcgcgggtaaacgtaatggtgctgccggagtcgaccttgctgaccttgtacgggccgctgcccagtggggcttcgtagccgccaccattggcgaagtctcgggttttccaccaatgctcgggaaacaccggcagggtggcgatatccagcggcagggtgcggttttcattgctggaaaagtcgaagcgcacctgacgttcgccttcgacttcgacatgcttgacgtcggcgaacagcgtgcgaaaacgcaggctgccctgggtcatcagcaggtcgaagctgtagcgcacgtcctcggcggtaatgggcgtgccgtcggcaaagcgtgccttggggttcaggtagaaacgtagcgacaagccatcgtcggcgcgttccattttctcggcgaccaggccatagaccgtgtacggctcatcgagggagcgctgggccagcggcgcatacagccaaccgtcgatttgagagacaccaatgcctttgtcgatatacggcagcacatggtcaaagcgcccgatctcgatggccgaacgcttcaggctgccgcccttgggggcgttcgggttggcatagtcaaaatggttgaagccggcggggtacttggccggttcgccgtaaaccgtgaggtaggtctgcggggccgcgatcacagccgacgacgccagcagcagggccagggcagaaccgagcagtgttgtaggaaaagccagtcgcattatcagccttgaacgccgggtgagcaggaataaggatttgtacgctaacggcgcacgcgtcgccagtgatcacatgcacaacggcccaccaaaaggcgggccgttgtttatagcatcagcacaggagggatcagtcctggcggctggtgacttccagcaggtggtaaccgaattgggttttcaccgggccctgcacggtgttgaccggggcgctgaatacgacggtgtcgaattccttaaccatctggccagggccgaacgaacccaggttgccgccgtcgcggctggatgggcagctggagttggctttggcgatttctgcgaaatcggcgccgccttcgatttgggccttgagttcgttgcacttgtcttcagtggaaacgaggatgtgacgggcggttgctttggccatgggaagtaactccttgaattaaaaacggtgagcctacccgattcaggtggttatttcctggcaaagttcccgccaattgcctgagcggctcaagagcgggccatggcaccgctgcgggtcagccactcgataaacagcgcgaacagctcggcctgggagttgatcgtcagcttggtgtacaagttcttacggtgcattcgcactgtttccggcgaaatacccagcacttgggcggtggacttcaccgagtggccgcgcaggatcaagtgggcaatttcacgttcgcgtacggtcagcacaccactgccaaagcccatgaatgcggcttcgatctgctggtgcgcctgggtctgggagtaggcttcatcgctgatcacctcggccagcccgcccgtggtgccgaagcggcgcagcaacgcgcggaccatcgcctggacagtctgttgtatcgccagttgctcatcggtaaattgcccggcgctcaacccttgaaacatgcacagggaaattttgctccgggggcacaggtcgacgatgtagtagctctcctgcgcgccgccgctgcgcaggtaataggttttgtagtactcgctgttgaagaagtcatccggggctatttgtgccaagtggtagaaaccttcggcgaggcccttgtccacggccaggcaaaacgggtccagcaggtaaccacgggaaaaatagcgatgaatgatttcgtcctgataggcccgcgggatgccttgctgatacagcaagtgcggcgccaggccctggcgctccaggctgatcgtcatcgattcgatgggggtgagggtacacagcgcggccgccaggtgttccaggaatgaagcgtcgtccacatggatgaacgcctgggccaaggcatggtgccaggcttcaagctgttgcagggtcggggcagggctgggtgtgctcatgccggccagtctacccgccggccagcacccaggcaaaaacgccgagacgggctcggcgttatggctcatcggccttgatactcgccgctctggcgcagctctgcggctgtttcgaggatgcactggcgcagggtctcgacgatttcatccacctgggtgcgggtgatgatcagcggtggcgacatcacgttcaggtgcccgataggccggaccaacaggcctttggcctgagctcgcaaatggattttctcgccgatgttcacggcgtccggtaacagggctttgctgcgtttgtccgcgacaaactcgatgcaggccatcaggcgctggcagcggatgtcgcccaccaacggcaactcggcgagggtttgcaggcgttgctcaaggtacacaccgacctcttcgacgtgagccagcaggttttcccgctcgataatctcgatattcttcagcgccgcgacacaactcaccggatggccgctgtaggtaaaaccatgggtgaagcagcggcctttgcccggctcgccaatcacttgccagatgcgctcggaaaaaatacacgcgcccaagggcaggtagccggaggtcaggcctttggcggtggtgatgatatccggctgcatgccgaacacgtcttcagaggcgaaaaacgcgccgaggcgtccgaacgaagtcaccacttcatcggcgacgtagagcagatcgtagcgttggcagatttcccacatgcgccggtggtaacccacaggcggaatgatcacgccaccggaccccatgatgggctccgcgaaaaatgcggccacattgtccgggccaagggtgaggattttgtcttcgaactcgttcaccaggaaatcaaggaaatcggcctcgctcatcccttcgggcgcgcggtaatagttggggcaggaaatgtggtggaacaaatcgctcatgaaatcgaattcaggggcgcggtcggcggccttgttgccgatggacatcgtcaaaaaggtcgagccgtgataagcacccaagcgcgagatgatgtgcttcttggccggtttgccacggctgttctgaaagaactgcaccagccggtaggccgtgtccacggcagtcgaaccaccggtggtcaggaacacatgatcaaggtcgccgggggcgaggctcgcgagcttggcgcacagttcgatggcggtgacgttggccatgtcacagaacgggttggagtaggccagctggcgcacctggtgggcaatagcgtcggccatttcttcgcggcccaggccgatgttcgtacaccacatgccacccaccgcgtcgaggtagcggttgccgtgggtgtcgtaaatgtaagccccattgcccactgcgatgttcaatgagccttgctcacggtgttcgtcgaacatgtgaaagccgtgcatgtagtgggctttgtcggcggcgtccagcttgtcgtggtcgaattgggcgaaaaaagcgggatttggcagggtcatggcgtttaccttcagtggctgggtttacttgccggtcttcacggcattccaggtacgggtgatcaggcgcaccgccgcctggggctggcttttctgggtgaacaggcgctgcatcgtcgccgggtcagggtagatggccgggttgtcgcggatgtcggcgttgaccaagggtttggaggccaggttgctgttggcgtaatggatggtattgctgacgccggccatggtttgcggttgcaggagaaattcgatgaatgtgtgcgcgttggccacgtggggcgcatcggcggggatgtagaagttatcaaaccagatcaacgaaccttccctgggaatgaagtagtccagtttgacctgtgccccagcctcggtcgcccgcgcctgggaggtggcgtaatcccccgaccaggtggtggccatgcacaggtcgccgttggccaggccgttgataaatccgctggaatcgaactttcgaatgtacggccgcacggccatcaatacatcctgcgcggccttgaggtcctgtggcgcgacgctgttggggtccagcttcaagtacgtcagggccagcgggatcatatccgtgggtgagtccatgaaagtgatcccgcaatcggcaaatttcgacacgatttttggatcgaagatcatcgcgagtgagccaatcggagcgtccggcatgcgcgccttgatcatgtcgacgttgtaggtcacgccattactgccccaggtatagggtgccgagtaggtgacgccggggtcgtgggcttcaaggctcttgagtaccacagggtcgaggtttttccagtcgggcagttgtgatttatccagcggctggaacaccttgcccttgatcagcagcggcaccagcgaagcattcagcagcgccaggtcgtagccggagcgcccggagagcaatttgccctgtacggtttcgtaggaatcataggtgtcgtagatcaccttgatgcccgtggccttttcgaaatcggccagcgttgtgtcgccgatgtagtccgcccagttatagatgcgcagggtattggcggggtcgtcggcggcatggctcagcgaggtggttgccagcaatgtggcgctgaacagggcgataaaggctttgtgcatggggacccacctttgttgtgcttgttatcaggtcgagggactgattgcactgtcaggcaggtgaggggtgggcgccataccccgttcgggtagggttcagggcagcacgatgtagtcgttctgctggacgacgggccgatgcgggccttgcaccagatggatatagcgaccgtcgaccaggtcgatgggcaggcaatcgtcaatgtccatcacgccatcggtgtgcggctgggaccaggtgcgcagcatctgctgtttgccattgctcatggcttcccgcggatttcgggctaccgtcagcaggtaatgatgcgcctcgccaaacgcattggcctggtagccacccaggttgatgaaatacaggtgttgcgcgtctgcctgcggggccagatggctgagctcgactttccatccgtcgacgccatcgaccatcatccacgagtcgacgtgcacgcccttggggctgccaaaccagccgtcgcgcaattgcgaatatgtaccttgcagcgtgtccgccacggcgaataccacatcgtggacctcaattttagcgcgggggtgcttgcccccgagcatgacgacaaacagcattgcagcttcttcctggcgacttggcgagggttcaccatacttcgattgaacccttttgtctggtcagtgccacactgttaatccgcgaactcatcaggaggttgtcatgcgtaccattgatctggccggtgctcccgtccctgtcatcggccagggaacctggcgtatgggtgaaaacccggaccggcgccgcgctgaagtggctgccttgcaactgggtatcgacgagggcatgaccctgatcgataccgccgaaatgtacggggagggcggtgccgaagaagtcgttggcgaggccattcgcggcaagcgcgatcaggtgtttctggtgagcaaggtttatccgcacaatgcgagccacaaaggtgtgccgcgtgcctgtgaagccagccttcaacgccttggcactgaccatattgatttgtacctgttgcactggcgtggccagtaccccctggaagagaccgttgaagcctttgagcgtctgcgagaggcgggcaagatcggccgttggggcgtctccaattttgacgtggcagacctgcaggagctcgcgtcccccgcctgcgcaacaaaccaggtcctctacaacatcgaagagcggggtatcgaattcgatctgttgccatggtggcaacagcaccatctgccgttgatggcttattgtccgatcgcccagggtggtgaactcctggccagccccacactcaagcagatcgcccgtcgccatgacgtcacgtccgcccaggtatccctggcctgggttctgcgccaggacggcgtgattgccattccaaaggctgtcacacccgaacatgtgcgcctcaatgccggtgccgcgaacctcgtattggatgagcacgatctggatgcaatcgaccgcgtattcggcgcgcccaagcgtaagcatccgttggcgatggtctagtcagcttatggaaacggcgccttccctggcggccgttcctgcaactgtcgaccttagccggctaccgggttacgccagtcgtccgagccggaggtgccggcgacttcgtgagtccagatgatcttgcggtaggtgaaatacacatcctccaaatgggtgaagtgggcgttgtccgggtcctgacaattgggcatgcgcgactgaatgtcgacgacggtcgcgccttccagttcaatcgtgaagtaatgctcctgggtgccggcggaagaagtgcgcaaccattccagccggcacgacacttcttcgccgcaggtcaatgcgctgaatagcagtggcgaggatttgtcgaagaccttgctgatcatcaacggcttgtgaacccgctggccggttggctgacccgattgtggatcgcggggaatgattacctgatgggcaaatgcctgcaccaggatctgatcctcatggccctcctgataaatgttgcctaccgagtcctgggtgaatgtgcctgccgtgattaaaccctgtttaacaccggtgatcgagagataggcgggtgttggcataagtggtttccttgcctgattaagtaggtagaccgaacggtgaaattaccgaacgggcaaatgcctataacaagaagcgtgcctgaaatgccgaaggctaatgaaataaggggtttgtcttggcagggagtaagcttataaaaaatatatatcggtttgggcagttgtttggtgttttatcttgcaggggtgtgcgcagttagttgcacatatattttgtccagtgggtgggtgtttgcgcaaaagattcggggtaattattcgaatatggctgcgcaaaacaatgcgcatgcttgattttaaaggggttgtaggaaattacttaagtgcaggtcttgcgcttgctgattgttttttgaatggctaaggtttgtctgccccgcctcttggtgaggggggatcatatagcacccattaacgtattttaattacggcccggttgcttgtatttacctttggaagttgtgcgcgatcccgaatggtttattcagacaaactctatgttcactacattgaacttgctcggctgccttgtgtgtcgggggtgtttgctggctgtgatatgcgcttttcgagtgagtatgaagcgctggaattcgaacttgcaaaggtgcactcgattcatggtgcgagcttgccggattggccagcagtcagtgaaatcagtgagcgcctgttgcgcgatcactccaaggacctgcgagtcgctgtctggctgacctgggctttgcaccaacgtttttcgtttcccggcctgctggcaggcctcggtgtgctgctcggcctgtgtgaacaccattgggcagtcatctaccccaccaaatcacggacccgttgtgctgcattcggttggttggtgctgcggctggacccgctgtttacgcagaatatttcactggccgggcaattgcccctgttccaggcgctgctggagcacatcgtgcggctcgatgagttatggggaaagcggctgggcgacgacgcccccttgttgctgccgattcgcaggcagttggcggagcgtctggaggttgctgctcaagacacgcctgcgacaggcgcggtggctggcgtcatcgagcacgtcaggcaggcagccactcaatgggtcaagcccgagcagccggtcaacaacgaaaaagacgcccataaagtcctccgcgcattgcaggagcaggcccgtcctctatgcaactggtggttgcgccagagtgccactgacttgcgcgcattgcgtctgggccgaacgctggcgtggctggtgctggtcagctactggagcgattgtctcgcgacccggtcaagcacttggcgctgctggaactgatgtacctgtgcctggcccttgggttcgagggtgaataccgggtgatggagcgcggtgtgtcacagcttgatgccgttcgcgatgccttgcatcgacagatccggcaggtacggggtgacccgcctcagggccccgttccacccataagagtgctgcgcaagcgttttcgatttatttccactacctgggtcgcggtgtttgtcttggcctgtgtactgggcctgtacgcagggtttgcctggcggctgggcgaggcgcgtgcggctgcactgcaaccctttcaattttcggcgtcggagctgactcaggcgcccttgtaaacgctgggagcaatgaatgaacgcattcttcaggaaggcgggcaccgtgctgggcactgtttgggtctggagcctgttgacggtagtgatctgcgtggtgctggtgtggtggatcgggccgctgctggcggtagatgattaccggttctggcagggcacaacggctcgtctcgtgaccatcagtgggttgtttctcgcgtgggggctggcgatggtctttatcggtgggcgcggcgatggcacgctcgacaccatcgagcccttggcacaccctccgcaatccgggtgggtcaaggatgagcgcaagcaggtgcaagggcgcttcaaggaagcggcccggatactgaaaaccacccctcgttatgcaccgcacactgcgcgctggcgcaacgacctgccctggtacgtgcttatcggcgagcagggcagtggcaagagccgcctgctggcggcggccggcttgccattgccgctcgatcgtgtcgaggcgacgccgcgcggtgagacggcacactgcgaatggcacttcgccgatgaaggcgtactgattgatacccccgggcgttacctgacgcaacctgacggcgcggtagacggtgcggggtggtcaacgctgttgagcctgctccggcttcgacgccgtgggcgtcccctcaatggtgtgatcgtaacgttgtcggtggatgcgctgtcggacaacaacgaacatgaactggagcgccacgcgcgatttgtgcattcgcgcctgcaggaagtccagcagacgttgcgtgcggatgttccactttacctggtgctgacccaggccgaccgcgtgcccgggttccgcgaattcttcgacacgccattgatgcaagacgccgatagcgtgttgggcgagcgccttgaggccagtaacgcacacatggatatcgcgcaaatccgccaggcatttgaggtgttgctgcagcgcttgagtgcgcaactgattgggcggttgcatcaggagcgcgatgttgaacgtcgtggtcacatgctcgattttccgcagcaggcagcccaactcggcgagcgtttgtgtctgtttatcgaatcggctttttcctcccaccggtaccagcgcatcaatggtttgcgtgggttctatctgacttctgccgatgacaggcgcagccatttcatacgggggttgttcagccgggagatctttgccgaagccgatcttggcggcctgcagattcaggagcgcaggcgcatccgcaggctccagtgtttatggggcgcagcggcggcgttcatagtgggtggggcaggctggttgtggatgcacagttattcggtcaatgggcagcgcctggcgcaactggcaacactgggcagccagccatcgccttcttccgagggggctgaccgcaacctggcactcctggcgtggctggatgcgcgcttggcagcgacgcaagtatttcctgcgccgggagaggtcaggttcgtcgagagtgccggcctttatcaaggtgaaatgagtcgcccggtcttgacccgtgcctatgagcaggctctgcagcagcagatgctgggtgcaattgctgccgagctgcaagagcaggtacgcgccagcttcggcaggcgcgagcaactagtggaaaacctgcgcgcctacctgatgctcaatctgcgtcagcgccgtgataacccgtggctggcacagcatatggctgatatctggtccgcgcgttactcaggtgatgcgcccacccaacagcgcctgaatgaccaccttgcgcgcttgcttgagcagccgtttgtggcgtcgctcgacgacgcgctcgtggcccgggcacgtgaagcgcttcggggagaatcgctggccgacggggtttaccgggcgttacgcgaacaatcgcgccaccttgagccgttgcgcctcaccgcaggcaaagccttcgctgcgattgagccccctgtgccaggcttttatacaaaaagatactggcagtatttcgaagcccagggccccaagctggtcaatgcactcgcgcaggacaactgggtcatgggcgagggcagcgacttgagtgccacggatttgcgccggctgatgtcagagttgcaacaacgctatttcagtgaatatgccgatgcctggagcgctgccctcggtcgcatcgacctgctgcaaaccgacaacctcaggcaggatgccgagcgcgtggcgagcctgacatccgccgagtcgccattgatgcagttgttgatggtcatccgtgaaaacacgcgcttgctgcccgctcaagggctgttggagaaagtcgcttcgcaggcaggtgagttgggcccggtggttcaagcggcatcggctgatgcgcaagtggtggcacgcaccgattccgcacggcgtgcgctgcaacggcggtttgagccgctgcatcaattgctcgatgaacaacagaacccgggtgccgaattgacccaggcgttgcggttgctcgacgaactgcatctgcaactcgccgcgttgaaccgggagagttctacggagcaggcagccttccaaagggtcaagcggcgaatggaaggccagcaggatgtactgggcaacctgcgtgacgcggcctcacgcttgccgttgccgctggccggctggtttgaaggggtggccgacgacagctggcgtcatctgttggacggtgcttatacgcacgtcaaccaacgttatcaaagcgaggtctatagcctttatgccaaggcgattcgtcagcgctaccctttcaatgcgcatgcgaccagtgacgtcgacttgaacgatttccaggagtttttcaagcctcaaggggttatgacgcgcttttacgagggttacctgaagccctttatcagcgccgacggcagccgctacaagctgcgtggcctggatggcaacacattggcggtcaaccgctcgttgctggatcagatgacgaaagcccaggttatccgacgcagctttttcaccgaggagcagggtgagctggctgttcgtttcaccttggccccctacagcctggaccaaggcgtcagtcgcgcgaccctgcgtctgggtgaaaagcaactggagtaccgacacggtccgattgtgcccgtgacgtttcagtggcccatcgaagcagaccatggccgcagcagcctgatacttgagcggggagcggaacaacgccccttgggtatcgaaaaaaacagcggcgcctggtcgctgttccggtttgtcgacttgctgcacaaagagccggggaacgggcgcaatgcgcaaatactcaaagcggaccttgctggtttgcgcgccaattacctgctgacgagtcaacgcacgcccagcccgtttgacatagacgattggcgaaccttccggctgccggaacagctgtgagccgcgcgcgcagtcaatggcgcagtgccgggcgcacgcagcaaggtcaggccaggcgccgcaatgaggacgcctacctcgactgcccgcagcagggttgttgggcggtagcggatggcatgggagggcaccagcacggcgatgtggccagccaatgggtgataagcagcctggcttcattgcctgccgggggaagcctggaccggcgtgtccatgcgacccggctgcgcctgcaagacctgaaccaacggttgacaggcaacggtgctcagccaactgcaaacagtggcgtcacgatgggcagcactgtcatggtgctgctcgttgaggaggggcgtgcagcgtgtgtgtgggccggggacagtcgctgctacttgtggcgcgggaggcgtttgtaccagctgtcccgggaccattcgctgttgcagtgcctcatggatcagggcgagttgagtgtggcacaagcaagggcgcatcccgacgccagggccctgacccgtgccgtgggtgcgcgagcgacgttgcaccttgaagtcctggaactcagcactcggccgggtgatgtgtttctgttgtgcaccgatggtctttatcaagtactcagccacgaagacttggggactgctttggatgaaaaagcgccgcagcaaatggtggatcgcttgtttgcaagcacgttgcgccggtctgcccgtgatgattgtaccgctgtggtggtacagcgatgagtgaggacatgatactgcccaccgtgctcgccgggcgttactgccttgagcgcgagttgggcaggggcggcatgggcgtggtttatcgtgcgcgggatctgctgcacgagcagtttggcgagccaagcccctatgtggcagtcaagctgctgggcaaggctttttcccaaagcccggacgctcacgtcttgctctacagcgagttttccatgacccgtagccttcgccacgaaggtgtcgtgcgtgcattttcattcgaggtcgatacgcttcgtcaggccgcttttttcacgatggagtggatgcacggcattacgcttgaccggttgcttcaagagtgcccgcaggggttgccctggcgagaattacagcccatcgccgtgcagttactggaggcattggcttatacccaccgccggcaaatcctgcacggcgatgtgaaacccacgaatgtgatggtgggagaagacggggtacgcctgttcgattttggcctgggccatgccctggcgcaggcgggcctgccgtgtttgagccgtagccggttcaacgcctggacgcccgtttacgcggcgccggaactgctcgcgggaagcgagctgaccgccgctgcggacctgtatggcgttgcgtgcgtggtgtacgaaatggctcatggagagcgccttgacgtgaatcgccctctgcggcagctcactgcgcctcggcaactgcccaggtattgctggccggcgttacgtctggcgctggaggcggaccctgagcgccgaagtatcaccgtcgcgcaattggcgcaggtgatgggccgccgccgaagccactggtgcctgtagcgcagacctcagttggccaacccatgcaattgacagtattcaacccagctcaacccggccatctgtgcgacttccttgtgcacctccagtcgctgggcctcaaaggcttcggcggactcggccgtcaacttgagcgtcagttcccaggcaaacaaatgttgacgttccgcttcggcttcaaatgcttcatgcaggcgttcggcgcgatattcggccagggtttcctttttggcttgtgctgccagagggttcagcgtgtcgagttgcgtggccacgtccggatgttcaatcaggaacctgtccagggcgcgctggtgattatcgccgggttctgacaagggctaactcctgtaacgtttttctcggcgccgggcgcgtttgcccaagtggcgaatgatccgggttcgcatgggctccagcaaaaaaaacagcacgtacgcagacaatgccaaggccaggtccaattccatccagtcatcatcgatcgccccggagagccttgcgatcatagttttgagcatgagcaataacgttatgccacacagccacaacagtgcattgaacacgagggggggcagcgggtttgacagcttgtgttgcatcttgaactgatctccttgttgttgagctcctgtaccgcaccgacaagcataacggttaagaaattaattctgaataaatacccgcgttgcggcaaaatcttttgctcccggtcaaaggatatctggcgttagccgggagtttcgggcccgcctgcgggcacagagcatgggtagaggggcggggcatggcgcaaacgctattcaaacttttccttacccagcgcctggcggctttggccagcacagagtcgctgcgcgccattcgggaagggctgttatggatcttgccctgcttgctggtgtcggccggctttctggttctgtccgagtgcgccaaggtcctgggttttgacccgcaggcagtggcctttctgtctgggctgcataaccagatcagctcggtcatcccgctgctggtggccgcctcaatcggttacatgctggcgatccagtaccgcttgcctcaattgcccgtcgctttcctgtgcctggcacacgtggtggttgccacctttgtcttgcgtgagtacccgcgggcttcggccacgttcgtgctgttcattgccattgcttcaccgctgatcaatgtgccggcaatcgcctggttgcatcgcttgcgctggacccgcctagtcaatgaaaacctggtcgggcataacttgcgaggtaccatcaatatggtggtgcctggcgtcatcacggcgttgtcgttggtggtgctgttgtctttgttgttgcagataccctacgtggcgcaactccaggggccgcaggtactggaagcgctgcaatcaccctatggcagcggtttgtttgtgacgctgatgaattcgctgctgtggtttttcggtattcacggcgtgtatgccatgcagcccctgtttgatgtactggaccaggctgtgctgctcaatggcgcggcatcggcagcgggcgcatcgattccctatgcgctcaatagcgggctgttggggtgttttgcgtttatcggcggctctggcggtgcgctgtgcctgttgctggcgatcctgctgttttccaaaagccaatccatgcgcctgttggcgatggccagtttgccgttgtcgttattcaacgtcagcgaagtgctgctgttcggcctgccgatcattcttaacccgcgcctgttcattccgtttctgctggtcccggcgttcaacaccatggcggcactgacggtggtgcaactggggtgggtttcgccggcggtggccagcgtgccgtttacggcgccggtgttgcttaacgcttacctcagcactcacggtgacctggccgccgtggggctgcaagtggtgctcctgggggtggggactttggtgtatgcgccctatgtccgcgcgattcatcgccaggccagcgaaggcggcacggtctacctcaagtcgctggacatgacgtttcgcggcctcgaagaaaaaggccggttgctggaactggaccccgtgctggcatcccacaggaccctggcgcgccaagcggttgagctgagccatatccagcagatttgcgactatgagttctacctggaattccagcctcaagtctccacccgcacaggcctgtgcaccggttgtgaagccttgatgcgagcccgcgataaccagggcacggtgcactcgccgtgggaatttctgcagtggttggcgcaagcgcggttgatgccggacgtggacgtttgggttgcctcccaggcggtacgtcagtatcagaaatggcagaaagccggttttgccttgccgatgaccatcaatatttccagcgccaccctgacgaacgccgcccatggtgagcgcctggtggagatcctcgcccaggcccgggggcaagtgtcggtggaaatcactgaggatgcgctggtcagtgacgtgccggctacgcgccagaccatccagaaacttcaggcgattggcgccaaggtgtacatcgatgactttggcaccgggttttccgcgctgagttacctgcatcagtttccggtggatttcatcaagatcgaccgcagctttgtcgtcgcccagcacgaccccaagggcgcccaggtgctgacgggcatgctgcgtttctgtgaggcgttgaacctgggcgtggtggtcgaaggtgtagagacggccgagcagttggcctttttgaataccggctccgaattgtttattcagggctggtatttcagcaaggcactgcccggcgatcagatgcagggctttgtacgcgagcgcgcgcaggcgcagcgttaaacctgtgtggacgcatactcgcggcgggtttgctcgatctcctcgaccagcccgtcgatgcgtgccaggcgagcgcggttgtcgtggtcccagggatgaaaacccggcttgaagtactgcagccacggcaacagcatgcgcgggaacacgcccttggggccgtagagaaatttgagcatcctccagaaccctttcaaatgcccaccggacttgcgatcggctatcagcaggcgcacatggaaatcaaacaccaccagccagaaaaacagcgtcgtggtcagcatggtgccggtacgcagcagataacgccccaggcctggcttgaccaccgtgttccacacatcgaaggccaccgctttgtgctcggtttcttcgagcgcgtgccagtaccacatttgctggtagcccttgagggattgcccaaagcgcgacgggtcgctgagcaggatctctgccagcatggcggtgtagtgctcaagggcgatggtcaccgccaggttgaaagacggcggcaggtgttttttttgcaggtcgagaatgaacttcaggcgccggtccagggtgtgggcgggcagaccggccgcttgcagcaagtcgttgtaggcgacgtgctcgcggctgtgcatggcttcctggccgataaagccctgaatctcttttttcaattgcgggtcgtcgatgcgttggcggtagtggcgcacgctgtccatgaaaaacagctcgccctggggaaacagcagcgacagtgcgttgaaaaagtgtgtaatgaacgggccttgttcgtgccagttcttgatgcgcccggcaggcaaggcaaagcggatatcgcgacggatcggcaacatggtgcgtgctcctgttcagaggcggggttcgtcgttggtttcaaacaccggcgcaggtggcttgggcgccatgcgcttgctggcgaacaccaccaacgcttggtaggccgcgggcagaaggcgcgcgagcgcgtccagaaagtaggcgtcacggccaatcaatacgcggcgtttgttcttgcgcacgccttgcaggatcactttggcggcgtggtcggcatcggtgataaacagcttttcaaaatctgcacgcgcttgttgttcgctgtggatcagaaaaccggtcatgttcgcatcgatacggctgctgcggcagatatcggtgcgaatgcctccggggtgcacgcaggtggcggacaccccgcagcgttgcaggtcaagttcctggcgcagggattcggtgaagccgcgcacggcaaacttggtggcgttgtagccgctcatgccgggctgggcaaacaggccgaacacgctggacgtgttgaccacatggccgtcgccgctggctttcaagtgcggcagaaacgccttggtaccgtgcaccacgccccagaaattgatgccgacaatccattccaggtcggcatagtccacgccttcaaccgtactcgacagcgccaccccggcgttgttgaacaccaggttgatcttgccgtgatcggccgcgcagtgagcagcccatgcctcaacggcctggcgatcggccacgtccagcacatgggtggtgacccgtaccggccacagggttgaggttttgatgagtgccagcgtctgttccagcccttggctgttcttgtccgccagcgccaagtggcagccttctcgtgccaaggccagtgccagggcacggcccatgccggaagccgcacccgtgatcgccgccacgcggccgttgaatgacttcatgacaggctgccttctgcggtggagtgaggcgccgccaaggggcggggcgccgggttggcgggtagggggctggcgacatagtccttgagcgcaaagtggcgggtcacgcgcttgaagcgccaggtcgaaccgggccacaacgtggtgttcttgccggtgcgggggtcgaggtaccagctctgacagccaccggtgttccagatggtgcgtttgagctgttcctgcaatcgggtgttgtaagcctgttccaccgcggatttgacctcgaccgtggcgatgcactggcgttgcatttgctgcagcgcgtcaaggatgtaggtgacctgggcctcaatcatcagaatcatcgagttgtgcccaaggcctgtgttcggcccgacgatcaggaacaggttcgggtagcccggcacggtggtgcctttataggcatgggcgccgtcgtgccaggcgtccagcaggtcgataccgccgcgaccgatgatgcagccgcgcgacaccgggtcggccgcccggaagccggtgccgaaaatcaggcagtcggccgggtgcttgatgccgtcggcggtgatcacgccgtcggcttcaatgcgcagtatcttgtcggtgagcacctcgacgttgctgcgcgacagcgccggataatagtcattggagatcagcacgcgcttgcagccgatggtgtagtccggcgtgagggttttgcgcagggaagggcgggcgacttgtttgtgcaggtggcgtttggcgattttctgcaccatcgtcatcaaccgtggatgcagggcgaagccaatgacgcggccttccagcgcccaatagaacgcaccgcgcacgaggcgctgggtgaacggcagatggttgaaggcccagcgttccaggcgcgagatctcgcggtcgggcttgggcatgatccacggcggcgtgcgctggaacaggtccaggtgggccacctgcggcgcaatctgcggcacgaactggatggcactggcgccggtgccgatcaccgccacgcgtttgcccttcaacgaatagtcatggtcccagtgctgggaatgaaagcgtttgcccttgaaactgtcgagccccgcgatatctggcagcgccgggcgcgacaggccgcccatgcccgacaccagcacccgcgcactgacctgacgaccatcgctgaaactcaaatgccagcgttgttgctgctcatcaaataccgcttgctcaaggcccatgccaaaacgcaggtagggcgccagctcaaagcgccgggcgcatcgctcaaggtaggcgcgaatctccgcctgcggcgcaaattgccgtgtccagtccgggttgggggcgaaggaaaacgaatacacgtgggattgcacgtcacaggcgcaacccgggtagtggttgtcgcgccaggtgccgccgagggtagcggcctgctcggcgatgaaaaagtcggtgagcccggcttccttgagtttgatcgccatgcacaggccggcaaaacctgaaccgatgatggcgatgtcgacgaaatcactgtgggcattcattggccggcctcatgacgagagcgcttggagggcatcagacgtgctcctgttttttgtgagtcttttagatagaacaccattgcaaaggaaaaatgaattaattattttaaaaaagattttaaataatctacctgaaaaaaacgcctacgctaggaccttgttgcgcctatgagccttgtccgacgggcgagcacggtatgcacgaagtccggaccttagggtggacgttggctgaggccttgatcaattccggtcgggtcgccagcagcagggaagcagaggaccgagctatggctgtcgattgggtagtcgctgcgggtggggtggtggttgtcagtgccgtgctgtgggccttcagtgccctgatgacaaggcgcattgaaaccaccgttgcgatcaacgggcgcttcgtggacgtagagggcgagcgctttcattatgtggaggagggcaagggcccaccgctggtcatgatccatggcctgatgggcagcagtcgcaacctgacctatgccctgtccggccaattaagtgagcgttttcgggtgatcaccctcgaccgtccaggctcaggctattcgacccggcattccgggacagccgctgacctgccgggccaggcgcggcaaattgccggtttcatcaagaccctggacctggataaacccctggtgctggggcattccctaggcggagcgattgccctgtcgctggcgcttgaccaccctcacgccgtgtcagggttgattctggtggcgccgctgacccacccccaacgcctgctgccgctggtatttctggcactggcggtgcgcccggcgctgttgcggcgctggatggcgcacaccttgaccctgcccatcgggctgctgaccaaaggcgcggtggtgaagggcgtgtttgccccggaccctgcgccggcagacttcgccacgcgcggcgggggcttgctcggtatgcgccctgacaacttctacgctgcctccaccgagatcaacacggtcaatgatcacctgcccggcatggtcaagcgctacccgcagttgaccctgccgatcgggctgatttatggcgcccgcgacaaagtgctcgacttccagaaacacggccaggccctggccagcaaggtgccggggttgaagctgcaggtggtggaagggcgcgggcatatgctgccgatcacggcgccggagcgtgtggcagcggtggtcgagcaggttgccaagcgtgtgcggctaccggaaagcgccacggtgttgcatccgacgtttgcgttggcgagtaaataattgtgccatccgactcgcggttcaaggccgtcaacgcctgctttagacacctgaccaaacggctgaaaaagagactgtccggtcacgtaaaaaagccaccaagaaagtagttgacgacctaacgattccgcgctatttatttaaaaaaattatttcaatgtcttatttgaaacagtttttgcagtgcctaagagcgaataaaataatgaaaaaaacgtcttttatcgcatggttgatttctcggggcagtcagtgctccgtgaacctgtttagcgcttctcacgtttgcctgccggccctccgtgtgcggaggttgtcatgaatcagactgtggcgagcgcaacgacctggaccgacggcaaacgtcacctgtggtggctgggcatcatgccgctggccacgcctttactctcaggtgcgctggccatttctaccggcgtacaacaactgtggtgggtgggggtgctggtgatcttcggcctgatcccgttgatcgacggcttgctgggcgaagacgtcagcaacccgcccgagtctgccgtcagcggccttgaatcccaaagctactatcgctggattgtgtataccggtgtggtgtttgtcatctcgtcggtggtggtcaccggctggctcgccgcgggcggtatcgactggatcatcagcggcggcctgctcgacgccacggccactctggatccctccagcgggttggcaaaagcggcagcattcatcactgcgcgcaccgagctgcacggcgcggtgacctggttcacctacctgggcatggcgatgtctaccggcgcggccaccgggattgcgatcaataccgcccacgaactggggcacaaacccaaaccactggaagtgttcctggccaaggttacgttggcaccaaccttctacgggcacttctacaccgaacacaaccgtggccatcacgtacgcgtggccacccctgaagatccagccagttcgcgtctcggtgagagcttctgggcattcctgccgcgctcggtgtggttcagcgcacgttcggcctggaacctggagcgtgagcgcctgcgcaaactcggcctgccggccttgcactggaagaacgcggtgctcagtgcctggatgtacagcgcagtgttgtggggcgcgatgatcctgtggctgggcgcggcagtgattccgttcctgatcattcagggcatctacggcttctcgctgctggaagtggtcaactatgtagaacattacggacttaaacgccagaagttgcccaatggtcgttatgaacgttgttcgccacggcactcgtggaacagcaaccggattgtgaccaacatctttctgttccaacttcaacgccattccgaccaccacgcaaacccgacacgcagttatcaatcattgcgccactttgatgagtcgccgcaacttccctacggttacgcgagcatgattgtctgggcctatgtaccgtacttgtggcgccgccgaatggaccatcgggtactcaatcattatgccggggatattaccctgaccaatcttcagccctcacagcgtttgaagtatttggagaagtacagcaacagtgcaaaaccgttttaacctgaattgaacaagtgggtgttggacgcggggtttattaccagcgcaggtgttcgtcgcccacgatttgccggttttattgcaagaaagttgtttgaccctacaacaataatttcaagggaaggacgtacaccatgcaaaaccctgccacgtttaccgcccatattgtactggccgccctcgggctgattgtctatcaccaggcccaggccgcccgcatcgagccggcgggcagcgctttcacggctcaggggccgatcagcttctccaaaggcgcgctgatcagcgccgactgcaccattaaggtggccggcaaggtggcggcggatggtgcgtcggtgaatgtcgataaagttgagtttgatggcggccttaaatgcagccgtgtcgaagccattaacttgccgtgggtattggtcgccaaagatacaaaaagcggctccatgtctaagatcagtgtggatgttcacgcctttggcctgggtggaaagtgcggcccttcaacggccgatggtacgtgggacaatgccacgggtaagttggaagcctccaatgtgcctattggcgaagactgcaagatcaagacggtgtcgatcaagatgccgccaaacttcaaagttgttgagtaacccacgctccgaatgtttcagcggtaactgaattgaaatttggctggaaagggaagttctgcagtttcaccgtgacctctcgatcatggccattacccctggcgaaagactcgccataacatgtgaggaaaaacaatgaaaagcttgaaaactctcgtgtcgttgactgctctggctgtttgcatgggtgctgcttcgatggccagcgcggcgtcgatcagcccggaaggtcctttcaccaccaccgcaggctccatcgtcgtgcagtcaccgtcttctttcgggggctctgtgacctgtggcattactttcagcggtgtggtcagtggcggcgtcgccactatcaataacgcggcactgaccggtggcggcctgtgcggtctgcccaccctgaaaagcatcccgtcgccaggctggaagctgaccgctctgtcgggcaccaccggccaagttgaaaacgttggctacaccatcaagaaaaccatcgtgattccagccactgattgcggcccgtccaccatcaatgtggtctggaacgccgccgcccacaccctgaccgcctccaaccaggcactgagcggcggctgcaacatcgtttcgctgaccaccactgccgccggcctgaccgttaacccataaggttgtcctgcagaacccggggttgatcacccgttgaaaggccggcgcctcgccagaggtgccggctgacgtggaaagccggccatgcaatgccggacgcgcataataataaggagtgccgcatgatcactaagaaacaacaggctaaaacactgctggggctggcgatactgggggggttgatgacgactgcgccggtgcaggcaggtggcttctccacgccgacttacggcgcccctggctggggccgggcgttcggtggcggttctctgttcaagaacgacccaagttctgccttcaacaacccggcggccatggcgtttgttgaccaatccgtcgtgcaacaaaccgtcgactatgcccgcgtcaaaatcaaatacagcggccaggcttacgactaccagggcaacccggtgaccaacaccgcagtgatgcccgatggcagctttgatccaggcacggccaccgtcaataacaacgatggcggccaaggtggttttaccgcgtggctgcccaccggctttctggtgatcccgatgggcgaccgctttgccttcggcttgtctcaagtcgtgccacaaggcatgcgcaccacgtgggatgaaaactccaaggttcgcgatttcgccgtcgataccaaaattgaaaccgtcggcctgacgggctccttgtccttcaaggtacgcgacgacttctccatcggcggtggcgtgatcgttcaacgcagccaaggcttcgtcagccagaacattgacctgttctcggcggcgtcggtctcgcctggcttgagcaacggcgcatttccgcccggcgtcggcaccgcgctgatgcgcgtcaaggtcgacaatatttccaccggctggtttaccggcgttgtctggaagccgactgacaaggattccctgggcgtgaactaccacgccaaaatcaaaaacaagatgaccggcaagtacaacatccgggctgacgcactgaacaccggcttgatgacggacgacacgatcttcggtaacggcaaaaccctggttgaaaccgcataccccgggctgaagttgttcccgaacggcgcacatgccagcactcaactggatattcctgcgaccgccgcgttcgactgggtgcaccaattcaatgatcggtggaccctgggcgtcagcgccatgtggacccagtggtcgtccttcaaggacctgacactcaagtcccagggctcgacgattgttgccattccctacaactacaaggacgcgtggatgtactccctcgggggcgacttcaaagccactgatgagctgaccctgcgcgccggtgtggcctatgaccaaacccctacgcgtaactcgacgcgcgacccgcgcattccggacggcgaccgttattttgcctcgctgggtgccggttacgacatcaaggccattcccggcttgacgctggacgccgcgtattcgcaccagtttgtagaaaaggtcaacatcaagacccagaacgttgatcgcctgggcggcggtcggctcgacggtacggccgagtcttcaggcgacattgtcagcctgtcggccacttacaagttctagtaccacaagggcaggaagtacctggcgcatccgggggcctcctgcctgaccttcctccaaattcgtaacaaacaggctgacgggttcatgccttatttttttgcctatgcattaaataaaaatttcaaaacagaatttgaatattcgctttcaagtttgtagtgtggttttacgccgcaggtcattccggcttgttcctggcgtgtgccgtaccctgaatcgagtcgaggtatccccatggttatctggttattggcgggttttgcagcagcgattgccctggcgtatcggcaagcggctgcggccctttggttggcagcgggtgtgatctggctggcgttgggttacctgctcaacgtggtcgccgggtctggcgccaccgtcgcggcggtcctggtggtgttgcccgcgctgttgctggcgattaaaccgctgcgccgcaggctgttgagcagcagggcactggcgctgtttcgcaccatcatgccggcgatgtccgacaccgagcgcgccgccatcgagtccggcaccgtgtggtgggatgccgagctgttcagcggcaagcccgactggcaacgcttgctgcaagccgcaccggccagcctgagtgccgaagaacaagccttcctcgacaacgaagtcgaaaccctgtgcgatattgccaatgactgggaaaccacccaggtctggcaggacatgtcccccgaaggctggcagtacaccaaggatgccgggttcctcggcatgatcattcccaaacaatacggcggcaaagggttctcccattacgcgcattcgcaagtggtgatgaaactgtcgacacgctgctcggcggccgccatttcggtgatggtgcccaactccctcggcccggcggaactgctgctgcactatggcaccgacgcccagcgcaactactacctgccacgcctggcgcgcggcgaagacatcccgtgttttgccctgaccagcccgtatgcgggctccgatgccggggcgatcccggacctgggcatcgtgtgcaagggcgtgcatgaaggtgaagaggtgctcggtttcaaggtgacctgggacaagcgctacatcaccctcgggccgattgccacggtgctcggcctggcgtttcgcgctgaagaccccgagggtttgctcggcgtcccgggctccctgggcattacctgtgcgttgattccgaccgcgcatcccggcgtcaacagcggccgccgccactggccgttgaatgccgtattccagaacggcccaaccaccggcaaggatgtcttcattccgctggaatgggtcatcggcggccgcgaacaggtcggtaacggctggcgcatgctgatggaatgtctggcagcgggacgcgcaatttccctgccgtcagccaacgtcggcctgggcaaggtcgccgtgcgcggcactacggcttatgcggcgatgcgaaaacagttcggcctgcccatcggcaagttcgagggcgtacaggcgccgttggcacgcatggccgggcatttgtacacctgcgacgcggtgcgcaaggtctcggtcgcgtcgctggacgccggcgaaaaaccgtcggtgatctcggccatcgccaagtaccacgtcaccgagcgcgcgcggatgatcgtcaacgacggcatggacatcgtcgccggcaaaggcatctgcatgggccccaataacttcctggcccgcgcctatcagcaaagcccgattgccatcacggtagagggggccaacatcatgacccgctgcctgatcatctttggccaggggctgattcgctgccatccctatgtgtttcgcgagatggaagcggcgcgcaaccctgatcggcgcaaagccctggaagcgttcgacagcgcgatgttcggccacgtgagttttgtgttggccaacaccgtacgcgcggcggtgcatgctctgacgggcgggcggctgatttccgtaccggccaagactgactcggcgctggcgtcctattaccgccaggccaatcggctgtcggtggtgctggcgctgatctcggacgtgtccatgggcgtgctgggtggcgccctcaagcgcaaggaaagtatcaccgggcggctgggggatattctgtcgcagctctacatcctgtcctgcgtgctcaagcggtttgaagatgacggtcggccccaggcggacctgccgctggtgcactggtcggcccaggacgccttgctgcgtgcccatgaggccctggctgaagtgctcgataactacccttcgaaagccgcggcggccgtggtgcgcggcttgagcttcccgttcggcattccactgcacaaaccctcggaccggctgttggcgcaggtggcggacgtggtgcagacgccgggagaaacccgcgatcggttgctggccaattcctacattccgcgcccggaaattgacaagctggcttacggcgaactgggcttccgtttgttgccgcaggtggaattgatcgacgcgcggctcaagcctgcgatcaagagaggcctgatcgagccgatgccggtttccgccacggccttcaccggctggcgcgtcaaggcgcgggcgctggacctgatcagcgacgacgaagacaccctgctcggccgctatgtggaatacgccgaccatggcatccaggtcgatgacttcccgcaggactttggcttgctggaggccttgcagcagcgcaagcaagcgttggagccgacggcgaaacgtcgctcgccccaaagcgaaaacgcctcgatcaactaggaaaaaaccgatcaactgtgggagctggcttgctgtggcgagcaagcttgcttgcgctggggtgcgaagcgcccccaaaagccggctccagctgcgctgtcgagcgggagcaagctccctcgccacagcaagccagctcccacactgaccgcgtttacaaagcaaggctgtgttgtgagtgagtttctactatgagtgacagctacctttccttcgtcaattccccttggggccgccgcctggcccaggccatcggcctgccgcaaccattgcctctgcaacgccaccgcagcggccagcccgggctggccaacccggtgatcgtcgccggggcagggcgcctcatcgcgcaggtgcaacaggttttcagcgccaccgacactgtcaccgcgatgcctgcgaccctcaaggcgccgtccacggtcaaggtgcagggcgcggtgttcgacgccagtggcgtggtcgacctgcaacaacttgacgagctgtatgtgttcttccacgccaacgccaaacgcctcggccaccacggccgcgtggtggtactcggtaccgcgcccgaacactgtaaagacttgccccaggccattgcccaacgtgccctcgaaggcctggtgcgttcgctggccaaagagttgcgccgggccatcaccgtgcaattgatctacgtggcgccgggtgccgaagatgcgctggacagcagcctgcggttcttcctgtcgcgccgttcggcctatgtgtccgggcaggtggtgcgcctggagaaacccgtggatgggcaggtcgccgtgaacggggacaaacctttcgccggtcgccgcgcactgatcaccggtgcatcccgtggcatcggcctggcgattgcccaggtgttggcgcgcgacggcgcccatgtagtgtgcgtggacgtgccccaggcgcaggacgccttgcagcaagccgcagcaagcacaggcggctcggcgctgccgctggacatcaccgctgccgacgcggcctcgctgctgctggcccatgccagccaatacggcgcctttgatgtggtggtgcacaacgccgggattacccgcgacaaaaccatcgccaagatgaccgaagcggcttggcgcgacgtgctggcggtaaacctgcaagcgccgttacaactcagtactgcattgctcgagggtcaggcggtcaagccgggcgggcggattgtgtgcgtgtcgtcgatttccggcatcgccggtaaccttgggcaaagcaactatgcgacgtccaaggccggcgtgattggtttggtgcagggcctggcaccgcgcgcggcggcgcagcaggtcacggtcaatggcgtggcaccggggtttatcgaaaccgggatgaccgcgaaaatcccgctgatgatccgcgaggccgggcggcgcatgaattccttgtcccaaggcggccagcctgtcgacgtggccgagacgatcgcctggctggcccatccggcgtccggcggggtcaacggccaagtcgtacgtgtgtgcggccaaagcctgctgggagcctgagccatggactacgtgacgcagatcatcgacccaccgccgtcgcgcacaaaactgctgctggacggcgtgcgtgccctgcgcaaacctgcgttcgacggtgcgccgcaactgccggcagagcatctggtgcgttgcgccgtggacttgtccgccagtggcatcgcagcctacggccgtgcctgcgggtttcgccacgagcagggcgtgccgctgtcttacccgcacgtgctggcgtttcccttgcatttgatgctgctgacccggccgagctttccctacccggccagcggcatggtgcatttggccaatcgcattcgccagcatcggcggctggcgccaggccaggccctgcgcctggaagtgttttgcgagcgttgggttgcccaccccaaaggccaggcgttgagcattgctacgcgggcttacagtgccggggatctggtgtgggaaagcgacagcctttacctgcgtcggggcgtcaacaatcctgccggtgaaacatggaatgacgcattgcccttgcaggaagacggcctgctaaagacccagcgctgggtgctgccggccgatcttggccggcgctttgccagggcgtcgggggatttcaacccgattcacacctcggtgatcggcgcgaaactcttcggctttcgccgtgccatcgcccacggcatgtggaccctgggccgcgcgctggccgcccagcaaccgcccggtggcctggatgccgccgaggcccattgcgacttcaagctgccgatttttctgcccggccaggtcgccctgtggagccacccggtgaccggcttgcgccgtgaattcgaagtgcgcaatgtcgcgggtgataaaccgcatatgcgcggcctgtttgtctggaatgagaaccgtcgatgagtgactacagtttcaacccggccccgacccgccgcgtcgcgatcgtcggcggcaaccgcattccctttgcccgctccaacacggtgtacgcccacgacagcaaccaggatttgctggtggccgcgttgcagggcctgattgaccgttacaacttgcatggccagcgcctgggcgagtttgcggcgggggcggtgatcaagcactcgcgggatttcaacctggcgcgcgaggcgctgctctcgaccaccttgtctgcagacacgccggcttacgacgtacagcaggcttgcggcacaggccttgaagccgcgttgctggtggcgaacaaaatcgccctgggccagattgaagtcggcatcgccgggggggccgataccacgtccgatgcgcccatcggcatcaacgaatccttgcgccacagtttgctcgcggccaatcgcgccaaaggcgtgggggcaaagttgcaggccttgctgaaagtacgcccgtcgatgtttttcaaacccttgctgccgcgcaatggcgagccgcgcacggggttgtccatgggcgagcactgtgaagaaatggccaagcgctggcagatccggcgcctggcccaggacgaattgaccctcaccagccacaagcggctggacgcggcctacaagcgcgggttctttgacgacctgatcagcccccatcgcggcctctcccgggacaacaacctgcgcggcgacgcgagcctggaaaaactcgcgggcctgtcgcctgcctatgaccgacagaacggcacgctcacggcgggcaattccacccccctgaccgacggcgcctcagtggtgctgctggcgagcgaagcttgggctgtcgagcatggctggccggtgctggcatacctgcgtacgggcgagacggcggcggtgaactttgtcgacggtaccgagggtttgctgatggcgccggcctacgccgtaccgcgcatgctcaagcgcgagggcctgagttttgccgactttgacttctttgaaattcacgaagcctttgccgcccaggtgttgtgcacgctcaaggcctgggaagacgccgattattgccgtgagcgtctaggcttggaggcgccgctgggcagcatcgaccgcgcgaaaatgaacgtcaacggcggctccctggggtgtggtcacccctttgccgccaccggagggcggcaattggcggcgctggccaaaatgatccacgaaaacggcggcgggcgcgggctgatttcgatttgtgcggcgggcggcctgggcattactgccatcgtcgaaaagtagcgtgatcaaaacaataacaacaaggagactgccatgaacgctgtaagcctggaacacaccgaacgggtctggttgaacgcttacctgccgggcgtgccggcagacattgaggccgggatcgaggcatacccgtcgctgcgcgaggtgttcctggagcacctggagaaattccgcgagcgggtcgcctacgtcagcatcggcactgagatgacctacgccgactggcaggtgcaaggcgtcgcgtttgccgcgtggttgcagggccagggcgtgaagaaaggcgaccgtgtggcgctgatgatgcccaattgcttgcagtatcccatctgcctgctcggcacgattctggccggtgcggtggtggtcaacgtcaacccgctgtacacctcccacgagctcaaacatttgctcaaggacagcggagccgaaaccgtggtcatcttcgaaaacttcgcccacaccctggaaaaagtcattgacggcagcagcgtgaagcgcgtggttgtggcggccatcggtgatctgctgggcactttcaaaggtgcagcgatgaacttcatcctgcgcagcgtgcaaaaacaggtacccgccttcaacctgcgcgggtcgctgcgtttcaaccaggcgctcaagcaagggcgtgcgttgaaccactttccagtggccatggccctcgatgacctggccttcctgcaatacaccggcggcacgaccggcgacgccaagggtgtgatgctcagccatcgcaacatcatcgccaacctgctgcaggccaaggcgtgggtgggcgaccagctggaccaggacaaacaggaaacaaatgtcaccttgttgccgctgtatcacatcttttccctgacggtgaactgcctgatgttcatgtgcctgggcgggcgcaacatcctgatcgccaacccgcgcgacgtgaaacgcgtgcagatgatcctgcgcaaggagcgcttcaatgggatcgccggggtgaataccctgttcaacggcttgctggagaacaaggaattctgcgcgcgggacttttccgacctgcgcatggtgattgccggcggcatggccacgcacacggcggtggccaaacgctggaaggaagtcaccgggctgccgatcatcgaaggttacgggctgaccgagtgctcaccggtggtgagcatcagccctatcgacatcgcgcgcatgcgtgagatggagttcaccggcagcatcggtgtgccgttgccgtcgacctgggtgcgttttattcgtgaggacggccagttggccgacattggcgaacagggcgaactgcaagtacgcggcccgcaggtcatgcagggttactggaagcgccccaaggagaccgctgaagtgctggaccgcgatggctggctgtcgaccggtgatattggtgtgatggatgagcgcggctatatccgcctggtggaccgcaagaaggacatgatcctggtctcgggtttcaacgtgtaccccaatgaaatcgaggacgtggtggcgttgcaccccggcgtgggcgaagtggcggcgattggcgtggaagatggtgtgaccggggagaaggtcaagatcattgtggtacgcaaagatccgaacctgacgcaggagcagcttctggcccattgccgggagtacctgacggggtacaaggtgcccaagtatgtggagtttcgcaccctggaattgcccaagaccacggtgggcaaagtgctgcggcgggcgctgcgctaaagcccgccaccgtttcctgtgggagctggcttgcctgcgatagcaagggtgaatgacacaccgctatcgcgggcaagcccggctcccacagggaacggtggtgttttttagattgagttgatgttgacccagcgctcttctctggccgccactcgaatcgccgtcgccaaccgctccaccgcccacgcggcctcaaagtcagtgccatccgcgccctggccggccagcgccatgatcaactcctgcacctccagcgtcttcaactcgttgtaccccagttgatgccccgccgccgggctgaacgccgcataaccgggcagggcggggccggccagcaggcgctggaaaccttcctggccgacgcggtaaacacgcagttcattcaagcgctcctggtcgaacgccaaagtgccttgggtcccgctgatttcaaagctcaaatggtttttgtagccatgcttgagccaactgctgctcaccgtaccgcgcgcgctattggcaaaacgcagcagggcgtgaacctggtcatccacggcgatggatttgaggtcgctgctacctttgatagcggggcgccgggcatgcacggtctgggtgtcggcacacacgctgacgacgtcaccgacaaggtagtgcgccatcgacagtaaatggctgcccaggtccgccagggcgccgccggcatgctccacttcgcagcgccacgaccagggtgaagccgggtcagccatgaagtcttcgctgaactcgccctggaaactgatgatttcacccagctcaccgctggttatcatctgccgcgccaaagcgatcatcgggttgtgctggtagttgtaacccacccgcgtcaccaccccggcagcactggcggctcggcgcatggcgtcggcttgttccaggctgaccgccagaggcttttcgcaatacaccgccttgcccgccgcaatcgccgccatggccatggggtaatgcaggtggttaggtgtggtgatggccacgacatcgacctctgggtcatctatcagggcctgccaatcgccatgagccctggcaaagccccaggccgtggcgcagcgctgggcgcgttcggtgtcggcatcggccagggctgcgagcttgagggtcaccggcagttcgaacaccgcccgggcgttgttgaatgccagcgcgtgggcgcgccccatgaagcctgtgccgatcaagccgattccgagttcacgcatcgccgtggtcctttggattattgttttcaggaggtgtattaatggaataaatattctctaatttcaatagatggaacaaaaattcatttgttctccgggcaatcacccaagtgaatgcgacgatattcaggcgctgacgaaagaccttcagttaacaaaagataacgtagcgccgattgtcagacgattcgaaagcccgataggatggcccctgcttccttcaggcgctctagattgcaggtttcagagcccgggaaggcaagacgacctaacaataataaatcgggagaaaggtctatgagtgagcctgtcatgggttggggtatttgccgcccgcgcgccgcacgccaggttgcgttgctggccacagcgctctcgctgttggcaacggccgtgttggcgccccccgtactggcagccagcgacaccagcgcaacgccagcgcttgcgattgagtctcccaaggccgccaaaggcctgatgatcgatgtggtccatgccggcaagcgcctggtggcggtcggcgaccgcgggcacatcctctattccaatgaccagggcagcacctggacccaagccaaagtccccacccgccaattgctcacggcggtgttttttgtcgacgacaagcagggctgggcggtgggccacgatgcgcaaatccttgcgagcgcagacggcggtgccacctggacccagcaatttcaagacctcaagcgcgaagcgccgttgctcgacgtctggttcaaggacgccgaacacggcctggctgtgggtgcctacggtgcgctgatcgaaacgaatgacggcggcaaaacctgggacgacgtcagcgaccgcctcgacaacgaagaccagtttcacctcaacgccattgcccatatcaaggatgccggcctgtttatcgtgggtgagcagggcagcatgttccgctccagcgacgacggccagacctgggaaaaactcgaaggcccttatgagggctcactgtttggtgtcatcagcacggcgcagccgcagacgctgctggcctacggtttgcgcggcaatctgtaccgttccacggattttggcacgacctgggagcaggttgagttgaacgcagcgcgcggggcgctggagtttggcttgtcgggcgcaaccttgctggaggacggttcgattgtcgtcgtcggcaatggtggcagcgtggtggtcagccacgacgacggccagacgttcagtgtgttcaatcgcccggaccgtatttcgctttcttccgtcacggcggcaggtaacggcaacttgattctggccgggcaaggcggtgttcgtgtcgccacgccagccggcgctgagctctcaaaataataagaaggcggggtttcaatgagcagtcatcacaacgataaagcgacctttcttgagcgcctgatcttcaacaaccgcccggcagtgatcgtcatctgcctgttggtgagtattttcctgttctggcaggcgacgttgattcgcccgtccaccagctttgaaaaaatgatccccctcaagcaccccttcatcgagaagatgatggagcaccgtaacgacctggcgaacctgggcaacacggtgcgcatttcggtggaggccaaggacggcgatatcttcacgaaggaatacatggagacgctgcgtcagatcaacgacgaggtgttctacatttccggcgttgaccgctcgggcctcaaatcgctgtggagccccagcgtacgctggaccgaagtgaccgaagaaggctttgccggcggcgaagtgatcccgcagagctacaacggctcgccgcaaagcctcgatcaattgcgcaataacgtactcaagtccggccaggtcgggcgtttggtggccaacgatttcaagtcgagcatcgtcgatatcccgctgctggagtcctacccggacccgcaggatcagggcaagttgctcgcccttgattaccagaagttctcccacgagcttgaagacaaaatccgcaccaagttccaggaacagaaccccaacgtacagattcacatcgtcggtttcgccaagaaagtcggcgacctgatcgatggcctgatcatggtggtgctgttcttcggcgtggcctttggcatcaccctggtgttgctgctgtggttcaccaactgcctgcgcagcaccatcgcggtattgagcactaccctggtggcggtggtctggcaactggggctgatgcatgccgccggcttcgggcttgacccgtattcgatgctggtgccgttcctgatctttgccatcggcatctcccacggcgtgcagaaaatcaacggcatcgccctgcaatccagcgaggccgacaacgcactgaccgccgcacgccgcaccttccgccaactgttcctgccgggcatgatcgcgatcctcgccgatgccgtaggctttatcaccctgctgatcatcgacatcggcgtaatccgcgagctggccatcggcgcgtccatcggcgtggcggtgatcgtgtttaccaacctgatcctgctgcctgtggcgatttcctacgttggcatcagtaaacgcgctatcgccaagagcaagaaggacgcaaaccgcgagcattcgttctggcgcctgctgtcgaagtttgccagccctaaagtcgcaccggtttcgatcttcctggctctgatcgcctttggcggcggcctctggtacagccagaacctcaagatcggcgacctcgaccagggcgcaccggaactgcgcccggactcgcgctacaacaaggacaacaacttcatcatcagcaactactccaccagctccgacgtgctggtggtgatggtcaagaccaaggctgaaggttgctcgcggtatgaagccatggcgcccatcgaccagttgatgtggaagatgcagaacaccgaaggcgtgcaatcggcaatctcgctggtgaccgtgtccaaacagatgatcaagggcatgaacgagggcaacctgaaatgggaaaccctgtcgcgcaatcccgacgtgctgaacaattccatcgcccgtgccgatggcctgtacaacaacaattgttcgctggcgccggtgctggtgttcctcaacgatcacaaggctgaaacccttgaccgcgctgtgcatgcggtgcaggacttcgccaaggaaaacaacaaggatggcctggagttcatcctggccgccggtaacgccggaatcgaggcggctaccaacgaagtcatcaaggaatcggaactgaccatcctgattctggtgtatctgtgcgtggcgaccatgtgcatgatcactttccgttcctgggcggcgaccctgtgcatcgtgctgccgctggtgctcacctcggtactgggcaatgcgctgatggcgttcatgggcattggcgtcaaggtcgcgaccttgccggtagtggccctgggcgtagggataggcgttgattacggcatctacatctacagccgcctggaaagcttcctgcgtgccgggctgccgctgcaagaggcctattaccagacgctcaagtccaccggtaaagccgtgctgttcaccggcctgtgcctggcgatcggcgtgtgcacctggatcttctcggcgatcaagttccaggcggacatgggcctgatgctgaccttcatgctgctgtggaacatgttcggtgcactgtggctgttgccggcactggcaaggttcctgatcaaaccggaaaaactggcagggcagaaaggtaattcgctgtttgcccactgaacctgacgggtctgttcaaggaatgcaaagggggaagccggccggcttcccctttgctatttacaggttgaggaacagcttctggtcctgcggcgggctgattttggcgtgcacgatactgttgatgcgcttgttatcccggccggcctgggtcacaaggtctttttgcgtcaggtaacgttgctcgggcagtttgaggtgtgcggcactgtatccgttacgcggggtgtcgagggtcgggtagtggaagtgcgcataccacaaaaccttcaggctgtttttctcgcgcaccgcgtattcagtgagaaagtccccgcccttgagttgtttgccacgtttgaccagcccgatatccacacggccgtgggtccatagatagtcgacattttccgcgcggggatcctggcgcaggtaaccctcacagcggtgggtgattgcccgctggcgcatctcggttgcagcattcttccactgtgccacccatgccgctgttgcgctgttattgccatgattgacctgggccagctgtgcaagctgttcaagacgctcggcctggttctccagcatgtcactccagtctctggggttgacgctttcgcggcgagcggggtcatcgagtttctttttctggaactcaattgaacgctcgatcgcggcctgaccctccatcagtttttgcgcgtcaccggacaaggatgccagaggcctggttgagggtggggtcgtgggtttcttcggttgcgcctcgacgatctgcgcccattcaccttcagtggcgtgccagctgtaactggtcacgggttgcccggttttcgggtcaagcacatcgatgatcggaatgtcctggccgggttgtgacgtgcgcaaggtaccgacaagtgtctgcttatcgcgggtcttgaagacttttttgttttgcgtgcggccgggccgctccttgcgtaccgccaccgtgggcggaaggtgttgttcttcgcggatcaggtcggccagctcggattgagcctgggcaatgaactggctgaggcattcggtgtaacgctcgccataaaacgggcggacccgtgccgagcccatgtcctgaagggcctggctgatgcccagttcggccttgtattgatcgatcaggctgctgagcacggctatacgctcatccgcagtgtagccttcgtgttcctgcaactcgatatgggagtttgcgatgctgttgagctccccccggttgaaccgctgcatgaggaattcctccccggcagagtggttttcaatgctgcggtccacgctcaattcacgcaaggtgctcaggcgctccagcctggcgtacagcgcctgattttccagtggctgctcgccgcccttgataaacgcttcagcctgttttttgctcgccggggaatcgtttttccattcatcgagcagcgcggagtatgtgtccgagcgccgtatcagccgctcgaggttctcaactcgctcacccagtgtttgaatcatttgcgcgtaggcacccggcgcgttcacccgggtcctttcgatcaggtcaggcagcggttcaccggtgctggcgtgggtaaactcgtcatccacgtaaaggtactcggtgttcaatgaacgcagggtctcggcgatttccttgtactcctccgcacgtttttccttgaaaatattgaaatccattgccggggttgagggtgtgagggccttgatggcgtctttgcgcagtttgatgagctggtcagcttgctgttcgtagagcatgacccgggtccggtgcatcgctctcagcaaggtgttttgcgccagttccttctggtatcgctcggcgaactcatggccccgctcgggatggctggacaggccccacaaggtcttgagggctgtgtcggacttgtgcaatgagcgctcggtctctacaaggcgccggtcggcatcctccgtggcaatcgccgcaggctgtatcgccatcatttcatcggcatactttttcaacatcgtgttggtcacttcgacatttcggtcgacagtggctttcatacgggcgccgcctctgggcatgccacccttgagttttgggcgtgtatcaaattgccaatcacctctgctgtcgagggtcagcggtgggccggtgcgggatttgtcctgttcgtcaatcacgaacacaccctccagatcccttgcaaccctgtaccaatggctgtcaatgcgggcgtgcagcttgtcgccgattgagtacaggccttttaacggtccgcttgccatgggggcagtacggccagccggggcgggcacagcgaagctttcgatatgggcacgctgggtgggtgtgagcgcacgcgggctggaaaaagaaaaatcaaacggcgcggcctctgcgtcaagcacggtactcggcgccgactgatggatctgagccggctcgcgaggagccacatcggcgccgcgatgcagcgggatgttgacgtcgggatgttcggcaaaggggatgtcgcccacattgcgttgtttcaccgctccggtggttgtgtggctcagcaatgtccccacgttgaccagcaaatcaaccagcgcggcggtagggtcagggttggttgactcactcgcgtgctggatatcgttttccacgctggccagttgcaccagccaaccggccattgctccggggccttgcaatactggcaacagggtgttgaacagcagccagcccagctctttatgggacgcccaacggctctcggcatcagacgtggattggtccttggcgaggttgaccaggctgcgggcattggcattgaacaggtgtttcatcagttcgccattgttcaagtcccgtgccagtacgttggctgcgctgaagccatcgacggccagggtggtcggccccggcgtttcgggcgcatcgaattcgttgaacacgctgtaatgggcaatgtggggggtatgaaaaccaccattgccatacacggcgcgggccttggcgtccggtaaccaggccaggacgctttgctgcaacgggccgggttgttggatggcagccagcaagtctgcgcggctggcgaattcctgtagcggcgcagagagttgggggcggtagagaatgtgcgggccttttcgggcgtctttcggttcgatcaggaacatgttttcgaccacatccggcgttgctcccggttttcgcaggaaggccagcgggcgcacggtaatctccacgccttcgacctgccggctaccggctccgggcctggcgacggtttcgacaaactgcacgccttgcgcggtcagcccggcctggcttttgagcctcagctccgtcgcctgcatggcgagctgaatgggcacctgttcgataaacaacgcctgccgcgctctggattgtgcgttgttactgagcagatgttgttccagcaaagccggatagtttttaccgatatcgacttcgctgatcaggtccttgagctgttgagccagttgcgggtcgttgactggctggccgcgcaggcggatttccatctggcccttgggcaacccggcaaggttttccagggccatctgcaccaggctcattttcaccggttcgatgtagccaccggcgagtgttcccacggcgaccttgaacgtgatctccaggtctttggcgctgtaacccttggccgccagccgggtatcgagttgttgttcggcgtagctgcgaatgtccggaatatccgtaaggaacgttcggcctttattacgttgcacgctactggcgagtgccagggtgtggcgctgatacgcgaagcggtcggcgtcgctggcacgggtgagccaagccggcatcttgccagccatggcttgaagtgtggtggtcggtggctgcagggtgtctgtgaacgccgtcgccgtgctgctggcttgggcgaacagctgctccagttcgtcaacgttactgctggtcggcaattgtatggcgttcaggttttgcagctgcccgttgaggaggagggcggcctgcgtgtcgaacaccgggccgtccagcgccacccgtgcccacgtcattcggtcgaatacaaaacgatcgctgagccggcgctcccatgcggtggcaaacgtctccagcgacccatagggcgtgaccacgccggctgccgtgacatgaagcaccacttggcggccgtcgaggtcgcgggtgatcagcaggtcaggggcgaggatcttcgtggtggtatcacctttggccagggttgagtccagaacgtacacctgggctggcgaagcaccgaccgcgcgtacgcgttcagcggcgtcggggtagcgtgtgacctgatcgagggtttggcgttgtgcgtcgtccaggccgggttgctggatgccggcgatgcgcagcgtgtcctgcagcgtgtcgctgagccaggaccagtggctggcccgcggcacggcgtcgcgggtctgggggaaggcgttctggccccagtattggctgagtgcctcggcaaaaccggccttcaggttggggcgcacggagcggatggccagttccaccgcgtgcatgtccagcggcagaggtgtgtggctggtggggtcggtgatcttcagaaatcggtagtgggcagtatccatccacttgcaggggacgccgtggcggtcagagaagtccagctctgcaccggaggccaggtggtcgagggccaggtccagcaggggtgtcaattcatattgcaaaggctcggcctggctcggcactgccagcgaggtggtggtgacatcaatatcgagcgcctgatactgcgccttgagtgcctcggtcaagagcccggccaccaccaggcgtactgtcgggcggctggcaaagcgtgtcgcgacggtcgactccgcagtgccgacaggggtgggtgcgttcagccggtgttcaatgccctgtgacatccgggcagcccggggcgctggggcggatgagaacgttgcctggggcgtttcgatagcagggggggcaggcaagacctgcgggtggatggtgtagatgtagggcgtgtttctgaccgatagcatgcaagcgcttccttagcttgatggagggataccgcagaacggaaaatacctgccggtgtggcgggctgggcgggcaatgcgttatcaactgtttcgctgtggtggtgttattggcgtgtgcgccttgaacagcgcggggttgagcggtctgtttcgaggtgtttgttgccttgttgctgccaaaaatggcgccccatcggaacggctgggctatgattggcgctttcccgaagatgattgactgccatgactgccgacaccctgacctccgtccttgccaccagcgacatgctcgaaatcgatgggctgcacgcgtttgacttcgagctcgacgcagaaaagctgctgatcatcgccatggacggccgtgctgaaaaacgctggaatttcagcctggcgcaggtgcaggcagccaccttcgacgacaccttgcaaagctggacccttaccggtgattcgggcgagcaccgcctgatctgcctgagtgctttcaccggcaacaataacgacgaggacgaagcggatgatgatgcgtaaattctggcccttgctgatggcgggcagtgtcggtgcgatgtcggtgcaggccgcaccggcagacacctatgaactgttggtgggcagctacaccgccggcaccagcgaagggatctaccgcctgcaattcgacagccgtaccggccagttcagcggcaagccggtactcgcggccaaggcggccaacccgtcgtggctgacgatttccagggatcgcaagcacctgttcgtcgtcaacgaaaacggcccgggccagaaagacccggtcggccgtgtcagcagctacagcatcgacccgcagaaccatcagctcaccctgatcaaccaggtgcagagcctgggcaacgagccgacccattccagcgtggcggctgatgggcgctacctgttcgtcgccaactactcggtcctggaagatccgggtggcagcctggcgatcctgccggtcgatgccaatggcaagctgtcaccgccggtgcagttgagtgcgcacccggccagccgggtgaaccctgagcgtcaggcgtccaaccacgtgcactcggtggtgtcatcgccggatggcaaatacgtgtttgtgcaggacctgggggccgacaagctctttgcctaccactacgacccaaaggccaatcctgaactgccgttgaccccggcgaacccggcgtcggtgcagctgccaccgggcagcggcccgcgtcatctgctgttcagcgcggacggcaaacatgcgtggctgaccaccgagatgagtgcccaggtggcggtgttcgactacaacgacggcaagctcagccagacccaactggtggatttcgccgccgggcagccggtatccgacaaggcgggcgctgcgctgcacgcgtcgagcgacggtaaattcctgtacgtgagcaaccgcggcacggcgaaccagatgctggtattcagcatcgacccggccaccgcgcacctgaaggagctgcaacgccgttccgtggaaggcgaccacccgcgcgagttcagcctggacccgagcggcaagtttttgctgatcgccaaccagaaaagcaacgaaatcgtagtggtcgaacgcgaccccaagaccggcctgctgggtaaaaccgtgcagaaattggcgattgatgcccccagcgacctcaagttcctggtgcgtcaataagccacaggccccgcagtgcggggcctgagcctttctattaattctattaatagcggctactgtttcaaagcatttctaaggttcagcccccgggcgtaagtttggttccaaggccttccccggccacctaaccaaacgaacacaagggttaccgacatgaacttgaacctcttctccatcatcgccgcttccgctgtttccgccaccgtagccctgcctgctgccgccagcgttgaagtgtcgggtaaaaaatccagcaccagtgcctacacccagaagtacctgcaacaaagcgccaacttctacgccgcgctggatcacaaaacccagcagtgagcttcagaccccatagatcaaatgtgggagcgagcttgctgtggcgagcaagcttgcttgcgctggggtgcgaagcgcccccgaaaagctggcgaccgctgcgcgatcgagcgggagcaagctccctcgccacagcaagcccgctcccacatgttgatttgtgttcagctctagggtttcgccattaccgcgacaaacagcggcgattccagaaagcgctcaagccaaacctgtaagcgtttatacgaagtaccggcaaaccacactcgatccacatgggcatactgacgcacgaagggcgccagtgcagcatccgccagggtcaggtggttggccaacaggtaatcccgctcggccaacaaaccgtcgagcttgtgcaaaaacacctcgccctcggcccgataatgctccatcggctgctccgggtagcgttcggcgtacttgtatcgattcaagtgatgtttgaacacctgatcgttctcggcgatcagttccgccaccctcgggtcaccgcgcagcaaccagtcatcagggtcgtgctgtgccaacgcccagtgcatgatttccaggctttcttcaatcacccggccctcgacgcagagcaccggcactgtacccttgggcgacagcaccagcatttcagccggcttggccttaaggctcacctcgacgatctgcaccggcacgcctgaatagcgcaaagccaaccgcgcccgcattgcatacgggcagcgccgaaacgaatacagcagcgcttcgctcacttgacctccagcgtgctcaagccattgccctgacgcttgacctgaatctgcaccggaatgcgctcgtgcatttcctgcacatgggaaatcaccgccaccttgcggccctgggcctgtagcccgtcaagcgcatccatggccagttgcagcgactccgggtcgagactgccgaacccttcgtcgataaacagcgactcgatcttcaacgtgctggacgccatcgacgccaggcccaatgccagggccagcgacaccaggaacgtctcgccacccgatagcgagtgcaccgaacgcagttcgtcacccatttccgtgtccagcaccagcaggcccaacatgctgccgccgcgtttgagccggtagcggcgcaccagttggcgcagttgcacattggcgtggtgcaccagcagatccaagttgtaggcttgggcgatcttgcggaaggtgtcgccggaggcggagccgatcagcgcattgagccgtgcccagcgctgccattgctcgtacgcttgggtgatttgcccggccagcgcatggttggcgtcctgacggcgctggtcttcggactggcgggcgcgcagctcgataaccagtttttcgccttcggccagttgctgattgagcgtcgcgagttcgccatccagttgctcggcttccagcccgccattgtgctgggcatgatgctcggcgaggcgctgttcgcgctcctgcaacaaaaccttggcttgctcgaccgctttttcgctgccgtgcaactgctggcgcagttcggtaacttgcgtgtcatcaaaggccagcaggcgctcgagcccgtcgctgtccagctccgggtgctgggcgcgccactcgttgaggcgcgtgtcgagggtctgttgctcggcgtgcagcgcgtgttggcgttcctgcagggccttgaggtcggcggccaactggatcagcgtattacggatttcctgtaactgcccgttagcgtcggtttcactctggcgtgattgcgtcacggcggcgtcgaggtgctgttgccagtgttcagcgctggcgtgcgggccgagcagggcgccgagtgtttcctgtaccccctgttgctgggtcgcgagttcggtaacggcgtgttgcgcagcgtcccgttgttgctggcgatgctgctgattgcctagctctttgtcgagggtttgctggcgttgctgctgttcttccagctcctcgcgttgacgatccaactgctcgcggcgctggctgacctgctggtccagtgccatgaaggtgttggccgggtcactgcgcaagccgtcgagcgtatcggccggcaacagactggcgaaggcgctgagttcttcttcgaggcgttcgcggtcgttggccagttcgcgttgctggtccagcagcaattggcgcgcttgcccactggcctcctgcgccgcttgcagttgctgctgcaaacgcccggcgttttgttgcaggttgagcaaggcgccctggcggtgttcgtcttgggtgatgctttgcgtgagctggctgagttgctgggccagccaggcgctgcgctgggcggcgtcctgattgaacagcgaagctgacagtgggtgcgcttccaggctgggcgtcaggccctgctgttgaatcgccagttgttcttgctgttgcagaaactccttctgctgggcgatcaaaccgccgacttcaccgcgcaattcggtgagtttttccttaagcgtatcgacggttttttgtgcgttggcttcttcgctttcgtcgtggcggccaaggctttgcagcagcgcttcaggctgatggtacggatgctcatggctgccgcacaccgggcagggctggtcgtcctgcaattgttcacgcaattcttcgacgctggcactgcgcgccaggcgctggcgttccagcagttgcttggtcaccgtcagggtttgttcggcaatcgtcagctcggctttggtttgcaggccattgccgttgagtttttcccgttgctgcgcggcatcagccagtttttgcgcgatcagggcggcttgttgatcgagttgctgctggctgtcccacaagcgcgtgaggtcttcaagcccacgctgctgcttgcgattgtcctgcagcaggctggcgagcaattgaatctgctcggccacggcatggggttcggcgccggcttcctgatacaacagggccagcgcatcgcgttgttgggtgaactgctcggcggcggccgttgcgcgttgctcgagttgcggcagctcggcctggcccttgttcaggcggttgccgaccaacatcaattgttgcaggcgctcacggtaggcggcccaggcgtcgctcagcggcgcgagtacggcgctgccttccagctcggcggccaggtgttgcaggcgctcggcgacttcggtttgcttgtcctgcaagcctttgagtaaagcctggccttcagcgcaagcggtttcctgtcgttggctgtcttcgctgcgcttggccagttctttggtcaggtgggcgagggtgttgtgttcttcaaaggcctgacgcagcaatggggcagcatcggcctggtttttcagggcgtcagccaatgccgtctgcgcagcggattgctgctgctgcgcctgctcctgacgcgagtgcagcgtggtctgttgctcaatgtgttgttgaatctgctcggcgagcggcgtcagcaatgcggcgacctcggcctggcgcgcaaactgatgccgctgtggcgccagatggtccagccggctcaagtcctgacgttgcgggccctggctttcccagtgttgccgggccagttgcagttgttcggcggcgctgagttggcgctcctgccattcacgcagttccttgagccaggtgtattgcgtctccagctgtttaagctgcgcttgctggcgcttgaattgctgctgcgcctctgccagttgctgatccagctcggcacgcgcttcggcggccattggcgtcacgccgctcgcctggtcttgtagttgcttgtgggcgtccttggcgtctttggccttgtcgaacgcgcggcggcccaactgggtgtatagcgccgtgtcggtaagcttttccagcagttcgctgcgttcgttgtcgttggctttgaggaaggcgctgaattcgctttgcgccagcaacaccgcacgggtgaattgctcgaagttcaggcccagggctagttcaagttgggttttgtattcggttttctggcccgccagcagttggtcgctgtcgagatcaatcaggctttgccggctgttttgcagcttgccgccggccttgtcgcgggcgcggttggcctcccagcgtgcgcggtaacggcgaccgttgacgccgacgaaatccacctcggcataaccgccgcccgtaccacggcgtaacagggtacgcgggtcaccaatggaaatgtcgctgtctgcgtccggcatcttggcctggccggtgtcgcccagacgcggcacagcgccgaacaaggccaggcatagcgcatcgagcagggtacttttaccggcgccggtcgggccggtaatcgcgaacagcccggcgctggccaagggttcggcggtaaagtcgatttcaaacgggccggccagggaggccaggttcttcaggcggatggcgagaatcttcatggctgttcgccctcctgttgcacttcctggagcagcacggcgaagtccttcaaggtctgttcatccacttcgctgccataactgtcctgccaggcacggctgaacaattcctggggggtgagctggtcgagttcgatcaagcggtcttcgttgtcgtcttcactgcctcgtttgcctgcgtattcggcggcgatgcgcaccaggcgtacggccttgccttgcagggcgctttcgatttgctggcgcaggtcgggttgcggttcgtcgaggcgcacgcgtacttccagccacgggtggcgttgggtttcggcgagtaggtcgatgtcgggcagttcggcaagctgcttcagaatatccgccaagggcgcggcttccaggcgttgcaggtcgaccgagcgcggaatcaggatcggttcgacacccaccagggattggccctggaacgtcacgtcgagaatctggtgcttgtagccgatttcggaaaacgacagcggaatcggtgagccgctgtagcgaatacgctcctcgccgttgaccttttgtggcttgtgcaaatggccgagggccacgtagctgacggttctatcaaagagcttggcgggcaacgcctcggcattaccgatgatcaggctgcgttcggagtcttccgacaccgacccgccggccatgtgcgcgtggctgacggcaatcagcgcctggccttttttgcgtttggcattggcggcggcaatcagcttctcatgcacctggccaatgccaagcaggtagtcgtcacccaactgcgcgccggtcacttcggccgggcgcaaaaatggcagtgccaggcaccacccggcgatcttgcctttggcgtcaggcaacggaatcaacaggcgctcggcatccagctggccgtcatccagccacagcacacggcccagcgcgtgagtacgcaagcggcgcatcaacggcgcaggcagttcgatgcgcgagccggagtcatggttaccggcgatcatcacaatggtgagtttcgggttctgttcgtgggcgctgatgatgaagtcatacaggcgctcctgggctttgagcggcgggttgaccgtgtcgaagatatcgccggcgatcagcagcgcatccggctgttcggcctttaactggccgagcagccactcaagaaaacaggcgtgttcgaagtcgcgttcctggccgtgcaggttttgcccaaggtgccagtcggaggtgtgaaacagacgcaaggcgaactccgtggaagagatgaaaaggaggggagtttacctgtaaagcggatgcagtacttcagacgacacagatcaactgtgggagcgggcttgctcgcgaaggcggtgtgtcagtcaacacatctgtttctgacacaccgccttcgcgagcaagcccgctcccacaggggttaggcggtgtgcaggcagttcagtgcgcggtcggcgaggagtctggcgttgtcgatcaggtgttcggtggcgccggccaggtggcgttgctcgtcagtcagcgcctgggttgtgccggcagctgtggcggcggcacagcgcagcaggtcgcagatttggatcagggcgtcttcgaaactgaggtcgtggtgaacggtgaaggaggcgggtgggtctgggacgattttgttcatgaatgaaactcctactaagttggggagccatcctgatgtcgtttccacgcgacaaattaggtggcagccatacgcggggtggaaatccgagtagtaggactcggccagaccgaagtctgcccgcgtacagccgccattgagcgtttgcatacgatcatgacgcctactaatttccaggtttccacacccgatcgctgatatgcagcgacggagcgaaggctagccagtgaagtcagcaggcgcaaggccgtgggattgtctaggaaacttcctgcaaattaaagggacagggattgctggcctttaacaatgcatgtcgcccaagtgatgtggatcctctgtgggagctggcttgcctgcgatggcatctactgggtgtcactgaaacaccgaggtgtctgcatcgcaggcaagccagctcccacagggttttgcagggtgtcaggtagcttgggatttacttgggatacagcggcggcagactggtggtgtcggtggccgggtcttgctcgcgctcggccacggggatggccttgaccgcgcgccacaggtcttcgcccagccagaagtgcccgctttcgctgtagagcgcgccgttgaggccgtccagggcgtccgacagcggcacaaagcgcgccgccatatccgccagggtttccggctgttgccgcgcccacgcatcgagggcctggcgcgtggcttgggggtcgttggcctgggtggcgcgcttgaggtcgtcgagcaaggtgcgtgggctcgggccggtttgcgcagcgcgttgcacggccggttggcgacgggcgcgccaccacaggctgaagcccagcagggtggtgcaggccagcagcagcgtgctcagttgccacagccacaggcggttgtcgtccggtgcggtgatcactgtcggcgtagccggagtgtccaccaccaggctcgggttggtggccacttgcagggtgcgggcaggcacgctggtgcgttccaggtgatcttcgtgggtgttccaccacaccacttccaccgccggcagttccacggcgccggcgcgggtgggcaccagcgcttcgcggtcttcacggctgccgatcaggccccggtcgttgttctggttgccgagcaccggctggtcggggtagcgccgcaggccattgatatcgctgctgggcagggccggcagttgcgcgctggacaggccttcggccttgaccgtgaggctgcgggtcagcgaatcgccaacctgcacgtggtccggctcggggttccaggcttcgctgagggtcaggctgcgcgcgggtatccagggggcgtcggcggggtagatcgcgggtttggctttgaccgtcagcggcagttcggcagaactgacgtgaatcaacttgcccggcttggtgccctgcaaggtgttttcctggggcgggcgcgcttccaccagcgtggcgctgaaggtttgcgccggaatcaccagtgcaccgctgtgctgcgggtagatcgcgtagcgggtttcgatcacgccatggcggatactgttgatgactttttcataggtgcgcgactcgcccagttgctcgatgcgtgcatcgggaatttgcagcggcgtgaggctgctgtcgtcgtacagcgacaccgagtggtacacgcgcacagtcaacagtgcctgagcctgcacgtacacgctgctctggtcgaggctggtttcgataaacaccggcgccagctcggcgctggtgttctggctcgccgtttcgaccacttgcaggctgatcggctgggtcttgagctcgccgacttgcagcggcggaatcaccaccgtgccgttttccctgggcagcagggtaatgatccagcgcgtggtggcgtggttatcgccgcccagggtggtgagctggttgatctggcgcgtgccgctgacttcgaattgcgcatccaggggggacaggtcgggtttgccaaactgggtgacgtcgctggattccaccgtcagctccaccgtttccccggaattgaggcggctgcggtcgacgctggcggtcaggttcgccgcctgggcgtggcctgccgataacgcgagcagaagcagaagggtggtgcagcggctcatcgagtcttgtcctgatgttgttgctgttcataccagaatttgcgccgcagcagctcgccggggttgtccggaatctcccgcagccattgctccagggcctggcggtgttcgccgtcgatgttcgcatcggcggggcgcaaaggcggcgtggtggtttgttcgtcgcccaactcgctgcccggcacttcattgccgcccggttgcggcgtggcactcgtctgagtgtcgcctttgccggcttcgccctggccttgttccgactgttcgccaccggtactgttttgcccactcgcacccggttgcgcagtttggccgggttgggtggtttcgtcatcctcatttttgacaggcttggccggttcgggcgcggccttttcctgcaggattttctccaccagcgccttgttcttcaaggccggttgcagatcgggctgggcttccagcgcctgttcgtaggcgtcaactgcggcttccaactcgcccgatctggccagggcattaccacgattgtagtgagcgtaggcgtcgttgccctgggcaaagcgcttgatggcttcggcatagttgccggcctcgtacagcgccacgccttgccattgcgggtcttcgaagtgttcggcggcttcggccgggcgcttgtgcttgagcaggtactggccctgctggtcggggcgcagccacaggtcctgaagctcaaaggcatagctgggctgcggtgcgccgagcaataacaatggcaggcaaaacagccagccgcggcgcccggcgcaggcggccagcagcagcaagggcagcagcagccagtagccctggtcggcccaggtgtcgaggtgcagcaattggccgtcgttgcgcagattttgcgggccgtcgagcaggttgagttggcgcaggtccttgtcgtccaggcgcgctgcgcggtagcggccgcccatttcgctggcgaaggccttgagcgtcgggctgtcgaggcgcgggacgaggatcgcgccttgttcgtccttgaggaactcaccgctttcctgggtgaccggcgtgccttcacggctgccgatgccaaggatcgacaaggtcggcgcctgggcaccttgcagttgcaggcgaatgccctggcgttcctgtttggacagcgaggagcccaccagcaacaaacggccctggccgaggccgccttgcttgagcaggcccatggccttttccactgccagatcggcgcggtggccgggctcgggcatgatcgaggggcgcaaggcttccagcaggttgcggctggtggccaggtcgtcagagagcggcaccagcgtgtgggcgctgccggcatacacaacaatggcggttggcgcgttatcccgcgcttgcagcaggtcgtagagcttgcgtcgtgcctgctccaggcggttgggcgggctgtcggtggcgagcatttccggggtcagctccaacagcaccaccaccgggtcggacggcttctggctggactgttcaaccctttgccagcttgggccgagcaacgccaataccgccagcagccaggcgatgcccagcaccacccacggcgatttgctctcgcgaccattgccaccactgagcagcacggcatgaaaggccggcggcaaaatcatctgccagcgccctgcgcgtttttgccggtgccacaagtgccagagcagccagccgagcagcggcagcagcaatagccacccggggcggaacaggtaaggccacaggtcgctcatcgacgcctccgcaaacgcagacgtttgaggcgctggcgccattcagggtgctgctgcaggaaaatccccttggacgacagcctgttgaaggcgcgttgcaaggcgttgttcggccagcgttcctggatcaccagcaacatgctcaagatcaatgccagggccagcggtgcgctgtacaacgcctgggccggacgcgcctgggtgggttgttgcgccacgggttcgagctggtcgagggtttccttgattttttccagctcgtcgccgtcacgggcgcggaagtagcggccgttggtggcttcggcgatggccttgagcgccggttcgtcgaggtccaggctcgggttcacgccgagaatacccagcgagccggtttgctcggggtcggcgccgatgccgatcgggtaaattttcacgccttcttcagcggccaaacgcgcggcggtcagcgggtcgatctgcccggcgttgttggcgccgtcggtgaccaggatcagcacgcggctttgcgccgggcgctggcgcaggcgtttgagcgccaggccaatcgcatcgccgatggcggtgtttttgccggcaatgccgatacgcgcctcatccagccaggtgcgcacggtgtgccggtcgaaggtcaacggtgcttgcaggtaggcttggctgccgaacaggatcaggcccacgcggtcgccttcgcggctctcaaggaagtcgccgagcaagtgttgcaccaggctcaggcggctgacgtcgtcgtcttgccagtgcatatcgggaaagtccatggagccggacacatccaccgccaccagcaagtcgcggccactggcggcaatcggcagaggctcgccgagccattccgggcgcgcggcggcggtcagcagcagcaaccacagcaccacgaacggcgcttgttggcgccaacccggcaggttggcgcgggcgcggcggcgggcgaggccttcgaggtcggtgaggtagctgactttcagcgcgggttcaccgctgtccgccaccggcagcaccagccgcatcaaccagggcaagggcagcagggcgaatatccacggccaggcgaactcaaacatgtttgcggatccaggtgtcgacggcttgggtcaagccggcgatggccttgtcgtcgagtttgcactcaggcttgtaggcgccttccaccagcaccatccagcgcgtaagacccgccgccgggcagcggttgtcgaggaatgccagccatttgcggccgttgagggtgtggctctggctgtaggggtagtcgttgcggcacaggcgtttgagcaggccattgagctgttgcagccaggcaccggcgggggcgccgtcgtagggtttgggcatcaacgccagttcggccagggcggcgatgcgcagcgggtccaaaggctgttcggcgcgggccaccggctggcgtttgggcaaaaagcgccgcagccaccacaggccccagccgaccagcggaatcaccagcagcaacagccaccagcccggtgcaggcggccagaagccgatcgacggcggggcgatcaacggttgcaactggtcgaggctgctcattgctttttgaccgggcgttgcgggttgaggtattcgcgcagttgctcgaccatttcgccttgagtgctcagcggcatcaacagaatccgcagtttctgtgcgagcagttcccagcgggcgatacgcgcttcggcctgggctttgtaggcctggcgcagatcgaggttcagcgtgtccaactccagctgggcgcctctttgcgcgaagcgcagcagcccggcagcgggcagggcgtggtcgagcgggtcggagatcggcagcagcaacaggtcacaatggcgcgacagcaagctcaactgctgctcggcgccttcggtcagggcgcgctcgtcgccaatcacaatcaccaggctgcccgggcgcaacacttcgcgggcacggcgcagggccatgcccaaggcgtcggcctcggggcggctttcggtgttcaggctctggttgactcgcaccagccggttgagcagttgcagcaggctttgcttgctgcgccggggtttgatttcgtagtgctcgctgtcgccaaagaccagcccgccgacacggtcgttatgccccaacgccgcccagccgatcaagctggcggcctgcgccgccagcactgacttgaacatcttcccggagccgaaaaacagccggcagctttgctcgaccatgatgaaaatcggccgctcgcgttcttcatggaacagcttggtatgcggctcctgggtgcgtgcggtgacgcgccagtcgatggtgcgcacatcgtcgccggcctggtacacgcgcacctggtcgaaatcgacgccacgcccgcgcagcttggaatggtgcaggccaatcagtgggctgcgctggctgggcgtggaaaacagctgcacttcgcgcacgcggtggcgcatctcaatcagttcgctgagcgtgacgcggattccatcgctggcattcatagggttcaagcgacggcaacgacgtcaagaatgcgttgcaccacgcggtcctggtcaatgccggcggcttctgcctcgaacgacagaatgatgcggtggcgcagcacgtcgaacagcaccgcctggatatcttccgggctgacgaagtcgcgaccggccagccaggcgtgggcgcgcgcgcagcggtcaagggcgatggagccgcgcgggctggcgccgtaggcgatccattcggccatttccgggtcgaacttggccggggtgcgggtggccatgaccagttgcaccaggtattcctccaccgcgtcggccatgtacaggccgaggatttccttgcgggcggcgaagatggcttgctggctgacacggcgctcgggcttggtttcaccgttgagcgcttcgccgcgggcctgttgcaggatgcggcgttcgacggcggcgtccgggaaaccgattttgacgtgcatcaggaagcggtcgagctgggcttcgggcaacgggtaggtgccttcctgctcgatggggttttgcgtggccatgaccaggaacagcggcgacaggtcgtaggtgctgcgcccgacactgacctggcgctcggccatcgcctccagcagcgcggattgcaccttggccggggcgcggttgatttcgtccgccagcaccaggttgtgaaagatcgggccttgctggaacacgaagctgccggtttccgggcgatagatttcggtgccggtgatgtcggccggcaacaggtcgggggtgaactggatacgatggaattgcgcttcaatgccttcggcgagctctttgatggccttggtcttggccagccccggcgcgccttctaccagcatgtggccgtcggcgagcagggcgatcagcaagcgatcgatgagtttttcctggccgagaatctgcgtggaaagaaaggttcgcagcgcaagcagcgcttcacgatgttccatcgatgacggttcctggagagatgagcccgaacgctgaaaaaaacgccgggcctgggaggcctactttaatgcatcgcggggggtggcgactaacggcgtggggggtatttttggcaaaacttgtaggaattttgtgtggagtgcacagattgcgcctggtcttgctctattcatgtgggagctggcttgcctgcgatggcatcaaccgagtctggctgaaggaccgagtcgccagcatcgcaggcaagccagctcccacacaggcccgctcactacagggtgatttatgtccgggtgaaggtgccggtgcctttgagaatgttctgcagggtttcttcaacttcagccaaatccgacgccgcggtgctgtgggtgatctgcaattggtccttgccgcccagggcgtcggcatcgccggccgccagttccaccagcagtgtggtgttgcccagggtgactttcagcccgtccagggtcgatggctcgtagtcccaggtcagttccacttcatcttcgtccgggtaacgggtgagcatgaacatctcgccgtttttgccgtggcagcagagcatggccatgttgtcttcttcgtcatcgcacggtgtggccatcagtgcatcggtgttcagttgcagcatgggaaatcctgtctgggggagggtgcagcgcggcaattgtgccatcgcggcgaattttgtgctgcatcctgtgtcagacccaatgcatgacctgacgggctgtatcagtcatttccggtactcacaggcgcggaactaaccggttttcatgccggaatttgcgggttgcccaagtcgcaaccgccagcctgcgtaccgatgaccgaatatgtcgcagcgtcgcaagcagcggtcttcctacactcgttaagctgcgcaacggatgtgccctgtgccaggcgcctgacctgcccgtcgtaccgtcacccggcaaggtgtgcatcccgtggaagttgtatgtgacctgactgtctcttccagcttcacccacctgtcactccgattcgctattgtgcttttatcttcactggcgaacagagctgacggtctccccgcaaggggataacacgcgacgctttcatcaataacaagcccaagcggagtaccacagatggcgttcttcaccgcagccagcaaggccgacttccagcaccaactgcaagcggcactggcgcagcacatcagtgaacaggcactgccacaagtggcgctgttcgctgaacaatttttcggcattatctccctggacgaactgacccagcgtcgcctctccgacctggccggttgcaccctttctgcctggcgcctgcttgagcgctttgatcacacccaaccgcaagtgcgggtctacaaccccgattacgaacgtcatggctggcagtcgacccacaccgcggtcgaagtgctgcaccatgacctgccctttctggtggactcggtgcgcaccgagctgaaccgtcgtggctacagcatccataccctgcaaaccaccgtgctcagcgtgcgtcgtggcaagaagggcgagctgttggaaatcctgccgaaaggcacccagggcgaagacattcagcaagaatcgctgatgtacctggaaatcgaccgctgcgccaacgctgccgaattgaacgtgctgagcaaagagcttgagcaggtactggacgaagtgcgcgtggccgtggccgatttcgaaccgatgaaagccaaggtccaggacctgctggccggtatcgatgccagccagttcgtgatcgacggcgaagaaaaagccgagatcaagaatttcctcgaatggctggtgggcaaccatttcacgttccttggctacgaagagttcgtggtacgtgacgacaaggacggcggtcatattgaatatgacgccaaatccttcctcggtctgaccaagctgctgcgcgccggcctcaccgccgaagacctgcgcatcgaagactacgccgtggcctacctgcgtgaaccgaccgtgctgtcgttcgccaaggctgcgcacccaagccgcgtacaccgcccggcttacccggactacgtgtcgatccgtgagatcagcgctgacggcaaggtcattaaagaacaccgtttcatgggcctgtacacctcgtcggtgtacggcgaaagcgtgcgggtgattccttacatccgccgcaaggtcgcggaaatcgagcgtcgctcgggcttccaggccaaggctcacctgggcaaagagctggctcaagtcgttgaagtgctgccgcgtgacgaccttttccagaccccggtcgacgagctgttcagcaccgtgatgtcgatcgtgcagatccaggaacgcaacaagatccgcgtgttcctgcgcaaagacccgtacggtcgtttctgctactgcctggcctatgtgccgcgcgacatctattccaccgaagtgcgccagaaaatccagcaagtgctgatggaccgtctgaaagcctcggattgcgagttctggaccttcttctccgagtccgtgctggcccgtgtacagctgattctgcgggtagacccgaagaaccgcctggacatcgacccgctgcaactggaaaaagaagtggtgcaagcctgccgcagctggcaggacgactacgccagcctggtggtggaaagcttcggcgaagcccaaggcaccaacgtgctggccgacttcccgaaaggcttcccggccggctaccgcgagcgtttcgcggcgcattcggcggtggtcgacatgcagcacctcaacagcctgaccgaagccaacccgctggtgatgagtttctatcagccgttgggtcaggtgtccggccagcgcgagctgcattgcaagctctaccacgccgacaccccgctggcgctgtccgacgtgctgccgatcctggaaaacctcggcctgcgtgtgctgggtgagttcccgtatcgcctgcgtcatgccaatggccgtgagttctggatccatgattttgcgttcatcgccgccgaaggcgtgaacctggacatccagcagctcaacgacaccctgcaggacgcgttcgtgcacatcgtgcatggcgacgccgaaaacgatgcgttcaaccgcctcgtgctgaccgccggcctgccgtggcgcgacgtggcgctgctgcgtgcctatgcgcgctacctgaagcagatccgcctgggctttgacctcggttacatcgccagcaccctgaacaaccacaccgacatcgcccgcgagttgacccggttgttcaagacccgcttctacctggcgcgcaagctcaccgccgacgacctggaagacaagcagcaacgcctggaacaagcgattctcacggcactggacgacgttcaggtgctcaacgaagaccgcatcctgcgtcgctacctggacctgatcaaggccaccctgcgcaccaacttctaccagaccgacgccaacggtcagaacaagtcttacttcagcttcaagttcaacccgcacgcgattcccgaactgccgaagccggtgccgaagtttgaaatcttcgtgtattcgccgcgtgttgaaggcgtgcatttgcgctttggcaacgtggcccgtggtggtctgcgctggtccgaccgtgaagaagacttccgcactgaagtgctcggcctggtgaaagcccagcaagtgaagaactcggtcatcgtgccagtgggtgcgaagggcggcttcctgccgcgtcgcctgccgttgggcggcagccgtgacgagatcgcggccgagggcatcgcttgctaccgcatcttcatctctggcctgttggacattactgacaacctgaaagacggcgctctggtgccaccggccaacgtcgtgcgccatgacgacgatgacccgtacctggtagtcgccgcggacaagggcacggcgaccttctccgacatcgccaacggcattgccatcgactacggcttctggctgggcgacgcgttcgcctccggcggttcggcaggttacgaccacaagaaaatgggcatcaccgccaagggcgcgtgggtcggtgtgcagcgtcacttccgtgagcgcggcatcaacgtgcaggaagacagcatcaccgtggtgggcgtcggcgatatggccggtgacgtgttcggtaacggcctgttgatgtccgacaagctgcaactggtcgcggccttcaaccacctgcacatcttcatcgacccgaacccgaacccggcgaccagcttcgtcgagcgccagcgcatgttcgagctgccgcgttcggcctggaccgactacgacaccagcatcatgtccgaaggcggcggtatcttctcgcgcagcgcgaagagcattgccatctcgccacagatgaaagagcgcttcgacatctcggccgacaagctgaccccgaccgaactgctgaacgccttgctcaaggcgccggtggatctgttgtggaacggcggcattggtacttacgtcaaggccagcagcgaaagccatgccgacgtgggcgacaaggccaacgacgcgctgcgcgtcaacggcaacgaactgcgctgcaaggtggtgggtgagggcggtaacctcggcatgacccagttgggtcgtgtggagttcggcctcaatggcggcggttccaacaccgacttcatcgataacgccggtggcgtggactgctccgaccacgaagtgaacatcaagatcctgctcaacgaagtggtgcaggccggtgacatgaccgacaagcagcgcaaccagttgctggcgagcatgaccgacgaagtcggcaacctggtgttgggcaacaactacaagcagacccaggctctgtccctggccgcgcgccgtgcctacgagcgtgccgccgagtacaaacgcctgatgagcgacctggaaggccgtggcaagctggaccgcgccatcgagtacctgccgaccgaggagcagctcaccgagcgcgccgcgaccggcaagggcctgacccgtccggagctgtcggtgctgatttcctacagcaagatcgacctcaaggaagcgctgctcaagtcgctggtgccggacgacgactacctgacccgtgacatggaaaccgcgttcccgccgagcctggttgccaagttcggcgaggccatgcgtcgccaccgactcaagcgcgaaatcgtcagcacccagatcgccaacgacctggtcaaccacatgggcattaccttcgttcaacggctcaaagagtcgaccggcatgagcccggcgaacgtggcgggtgcttatgtgatcgtgcgtgacatcttccacctcccgcactggttccgtcagattgaagccctggaccaccaggtttccgctgacgtgcaactggagctgatggacgagctgatgcgcctgggtcgccgtgccacgcgctggttcctgcgcagccgtcgcaacgagcaggatgctggccgtgacaccgcgcacttcggtccgcacctggccgcgttgggcctcaagctcgacgaactgctggaaggcccgacccgcgaaggctggcagaaccgctacggcaaatacaccgaagccggtgtgcctgagctgttggcgcgcatggttgcagggactacgcacctgtacaccttgctgccgatcatcgaagccgccgacgtgaccgggcatgacgctgccgaagtggctaaagcctacttcgctgttggcagtgcgctggacttgccatggtacctgcagcagatcagcgatctgccggtggccaacaactggcaggcccaggcccgcgaagccttccgcgacgacgtggactggcagcaacgggcgatcaccatctctgtactgcaaatggccgacgcgccacaagacatggaagcccgcgtggccctgtggcttgagcagcacaaggacatggctgatcgttgggtggcgatgatggtggaaatccgtgctgcggtcggtacggactacgccatgtatgcggtggccaaccgtgagttgctggacctggcgttgagcggtcagtcggtgctgcaaccggcttgacccttcagtaaaacaaaagcccccgtatcgtgagatgcgggggctttttgttggaacactgtttatcaaacagagatggcacgcgtccgcgggcgatgaagatcaaaggtgggagctggcttgcctgcgatagtggtttatcagtagataaatgattggctgacccgccgccatcgcagcgatgcggcgagccgacaagccagctcccacagtttgatcctcaccattaaggcgcagcggtgcccaggcaaggctggacggcttttttcaacgcgatgttgttgtccggcaatataaacgttgcggtcaacggtttgccaccggctctagcgggagccaacgacagtgtcagtgtttgcccccgcgaggcgtcactggcccagtaagccagctcggtttgcgggacgtcggcactgagcgcaaagatcgtaccgacctggaaagccccgccttgggtccaaacaccattggccaaaacctcgatggcagcgcgtgtacctgcggtaatacgtaacggaccgtttgcactggcatccgggccttcatacggatcgctgtcgaagcccagcgcttgcggtgagatttgcagggtgaggctggctgccggattctgcgggtgacagctgatttccaggttggcattggtatggaagtcgccgtaagcgctgtcgccaaacgtgcgggttgtcagcatcgggctgtccgggtagggccgttcaagcaaccataacgggtgcgccggcgtgatgatttgagtggctgtcgactcattacccgcctgtgcaaatggggtgaaaagggctgctatcagcgtaaaggccatggcttgcattgaggtgttcgtccgtgtctgaggctttctgaaaaacccgcattgtgcaaatttcagctggcctgctctgtcagcaaatacgcaacttgaccgcgattacgccgtatatacggtagtccgctttagcgctggtgtgggagctggctccctattcacctgggcgtcagtggtgcttcagcaatttgctttccaggtggtccaagtgtctggtcatcagcgctattgcggtggctgagtcccgttgttcgacggcctcgacaatcgccacgtgctcttgccaagcacaataggtgcaggctttcgcttcaaactgggcaatgaccagcgaagtcaacggcaccaggctgttgagaaactgcgccagcggcgcattcccggcaatcgcggccaattgcagatgaaactctcccgacaaccggatcgccgggccgcgctggtcgcgttcaatgcagtcccgctcgcggccgatcagctcgcgcaattggcggatctgcagcggtgtggcctgggtacaggccagttgcacaacggtaatctcggtcatccgccgcgcttcgaggatctgccgtgtttgctgcgcatccggcgccgctacctgggcacgctggttgggccgcagaataatcacttgctgatgggacagcttggccaatacacgacgaatcacgctacggctcacgccaaaggtgtcgcccaggctttcttcggtaaagcggctggacggcgcgatgcgttgttcgagaatggcgtcgaacaagtgtgggtagatgtcgtccaccgagggctttttgccagccaccaggcgcatggcgggcagggtggcggtgacagcgttaggttggtgggcgtgggcggtcatggccggtctccaaaaaatcagctgcccagatggtcgtccgggatgttcaagcgaatacccatgcgcaggccttcctgaagaatgtgccgacgcatttcggcactggccagggcgctgttcttgttgcggatggcgcggaccacggcttcgttttcccgcaggcgttcagccaggtgttcgggggagttgcgcagcacctgggcgctttgcttgagcgcgttgctggtctgttgcaccacgttctggaagatcgggttggaggtcagggcgaacagctcttcatgaaagccgatgtaggcgttcatgccggcttcggcatcctcggcgtcgagggcttcgcgcatgtccatcaaggtcaggcgcagttggccgacttctttgctgctgatggattgggccaccaagccgacgatgaagggttcgagggtgtagcgcagttgcaggatgtcttcgaggctggcgtcggcgacggcgtcgctcgattgcggctcggtcacactggcttccagcacgaccacacctttgccgggcatggaacgcacaaggccgagggtttccagcacgatcacggcttcgcgcaggctggggcggctgatgcccatctgttcggccagttcacgctggccgggcagcatttcgccccggcgccactggccgcgcgccaaggcggcgcgcagtttttctacgactgaattgacgacggttgaggtgctgatcacttctgcgtctccttgatgatgcaaatacgatagtgaatcgtgtgatgtccgaatgtgggagctggcttgtcgggtcgccgcatcgctgcaatagcggtatatcagatgcagatgagttggctgacctgccgctatcgcaggcaagccagctcccacattgacaggtgttgtcctcaggcgcgggtcagaactcctgatgcgccggcaacaccggcttcttggcctggaaggcatagccttgctggccgtcgaggaccttgttggcgcgctggatgtcgatgtctttttcccagcgggcgatggccacggtcgccacgcagttgccgatcaggttggtcagcgcgcggccgatgcccatgaaccagtccaccgccagcaccagcaccaggcccaccaccggaatcgccgggatggccgtcagcgtagctgccagaatcaccagtgctgaacctggaataccgtgggcccctttggaggtgatcaacgacaccagcagaatggtcagcaagtccgtcatcgacagcggcgtgccggtggcgttggcgataaacacgatggctagggtcaggtagatggaaaaaccgtcgaggttgaacgagtaaccggttggaatcaccaggcccacggtggagctgccaattcccaggtgctcaagcttgcgcatgatctgtggcagcacggcgtcggaggaggcggtgcccatcacgatcagcagttcttcacgcaggtatttgagcaacggcagcatgcgcaggccggagaggcgcatcaccaggcccaggatcaagcccacaaatgcaaagcaggtcaggtagaacaggcccaccaggctgcccaggtgttgcagcgaatccaggccgtaagtgctggtggtaaacgcgatggcgccaaacacgccgatgggcgccaggcgtacgatcatacccatgatgcgaaagatcacgtggctcagctcgttgatcagccgcgaaatgcccgaagccgcttcgcccaccaggttcagcgcgctgccgaacagcaccgagaacagcagcacttgcagcacattgttgtcggcaaaggcgccaatcaccgagttggggatcaggtccatcaggaactggctggtgccgcgaatgtgctggcccttgtcagccagttcattgaggccggcggaggacagttgctccaggtgaatattggcgccttggccgatgccggtgctgaaggccatgatcaggccgatcaccagtgcgacggtggtgagcacttcaaagtagatgacggacttgaggccgatacgcccgacttttttcaagtcaccggcgccggatatgccgctgaccaccacgcaaaacacgatcaggccaatcagcattttgatcagcttgataaagccgtcacccaggggtttgagttgcgaggaaaattcgggaagggccaggccgcagatgatgccaagcatcaggccaatcacgacttgcaggaaaatcgaacgcgagcaccatctgagcatgggaagggatctctattcggtgccctggtggttccagggcttaattgttgtggtcttaccggtaagtccagtgcggggccagtctacgcttgggttttttcaaaccacaagtaaatattcggcggttgccaggtcccggtctgaccagttggtcgcgaagggcgatgcttgagcggttggcggggtgcaaattttttcgcttatcatccgccgcttgagacgtgaggtgatcatggacacagcagggctgaccacagacgcaaccgggcgaacctactgcacctggcgtacggcagcggcgcaatacccgcgctaccacgatcacgaatggggcgtgccggtggcggacgatattcagttgtacgagaaaatttgcctggaaggttttcaggccggcatggcgtggatcaccatcctgcgcaagcgcgagcaatttcggcaggcgtttgaaggctttgattttcgcaaggttgcgcagtatggcgaggccgaggtcgaacggttgatgcaggatccgggcatcgtgcgtaaccgggcgaagatcgtgtccacgataaacaacgcgcgcagggcgtgcgaactggtggatgaaaccggctcgctggcccgctggatgtgggcgttcgagcccgccgagacggagcgcccggcggtggtggatatggcgtactggaagggtaatccgacctcaccggcctcggtgcgcttgtcgaaagccctgaagaagcgcggctggacctacgtcgggccgaccacaatgtacgcgttgatgcaggcgacggggatggtgaatgatcatctggaggggtgtgcttgtcgccctcaaatcgagcacctgcgccgccagttcaaacgtccctgaacgccgttaaatctgtgggagctggcttgtcgggtcgccgcatcgctgcgatagcggcgggtcagccaactcatctgtagtctgatggaccgctttcgcaggcaagccagctcccacatggatttcagggtgtggctgattattttggcaggggcgtgagcacctcggccttgtcatccagcaccatcaccaccagcaacttcgccggctgtgtctggctggcattgctcgattcaaagtgccgcgaaccggctggctcgtagaaggactcacccacctggtaggttttggctttctcgtcattcacccgtgaagtaatcgcgccttgcagcacatacgccacggcggtgccggtgtggctatggggcacggtggcctggccgggggcatagtccacggtcagcatgatggtttttttgccgggcacatttgtcagtgcgtgctcttgcagcaccgtgatcgattccttgttgtacaccggttcatgggcgaaggcactgagagaggcgagcatcagcgtggtggcgagcagtcgtttcatgatgaggtttccgagtggttcgagacctcttcaccctacgcccgagcgcatgcccgaccaatgaccaatccgccggaaaaccggctagccaatctgttggaggatatcgcgcacccgatccagcgccgggtcgatgtcgagcaactcgatggcaccgaagccgatcaccaggccggacctgaccggcgcgtcatgaaagaacacgtccaccggatacagtcccacctcgacccgccgggccagttctatcagcagggggacgttcaccggcaccttgcacagcgccgccaagtgaaacccggccacggtgggcacggcttcaaaccacggcgacaagtccccggccaggcgttgcaaaatgcgttcgcgccgcccggcgtacaccgtgtggcagcgccgaatgtgcttgagcaagaagccttcgctgatgaacttggccagcgcccactggggcagcgttgaactgtgctggtcggtcaattgcttggctttgagcacggccgcataaatcgccggtggtagtacggcgtagcccaggcgcaactcgggcagcagggttttcgaaaaggtcccgacataggtcacgacgccacggctgtccatgctttgcagggagtcagtgggccggccttcgtagcggaactcgctgtcgtagtcgtcttcgatgatgatcgcaccgagctcgaaagcgcgggccagcaaggcttcgcggcgtggcaggctcatgggcatgccgagggggaattgatgggacggcgtgacgtagatcagccgtgccccctcggggattttattgacctggatgccttcgtcatcgaccggcacgccgacaacctgggcacccattgcagcgaacagctcacgcgccgggctgtagccggggtcttccatggcgacaatgctgccggcttccagtactacgcgggcgatcaagtccagtgcctgctgcgcaccattggtgacgacgatgctgtcggcacggcatttcaccccgcgggaaaacgcgatatgcccggcgatagcttcgcgcagcgccggcaagccttcgggctggctgtagaaaccgctgttgagggcgatacgccgcaacgcatcctgggtgcagcgccgccattcatcctggggaaactggttgcgcgacgtcgcgccgccgataaattcatagcgcaaggtgctgtcgcgcgtgggatggcgcatgggcgagggcagcgcggcccatttcgccaggttggcagcgcaggccaggtcggtggcggtttgcaggcgctcggcctggggcgcgtgggcgttgacgaaggtgcctttgccggttttgcctaccagcaggccttcgtaggtgagggcggcgtaggtgtcggacacggtcttgcgcgatacacccagttgctcggcaagcaggcggctgggcggcagttgcgcaccggcggccagacgcccggagccgatggcttcgcgcagctgctggtagagctgttcggccaggtccttgcggcctttgatcaccacgtgcagttccatgtttcatcctgatgcaaacgatctgcgccaaggttactcgctcgcggggtgggctcaaaatggtctctgcgtaaaccgtctgattggctatagggcttgtcgcacgcgggctctaggctgtactgcaattgcagctgttacccgagaaccgccccatggaaccccgcctggactactacaccgcctcgccgcaggcactaaaggccatgctgatgctggaggccgcaacctttggcctgtccatcgagaaacccttgctggacctgatcaaaattcgggtctcgcagatcaacggctgcggattttgcaccgacatgcactcgatggcggcgcgccagcgaggggagagtgagcgacgcttgttcgcgctgtgcgtgtggcgtgattcgccgtttttcacggaacgggaaaaggcggctttgacctggagcgagtcggtggcgaggctaccgacctccagcgtttcagatgaactctacgcggcggtgcgcacagcgttcagcgagcaggaactggtggacctgaccatggcggtgtccagcatcagtggctggaaccgcctggcggtcagttttcggcagcaaccgcccaacgcttgagaacaccgccgctcccacattcgtggggggtaagctgcacaatcaggacaggaaaccaccgtccacattcagcgacacaccggtggtatagctggacgcatcgctggccaggaatagcaccgcgccggccatttcactcgggtcggccacgcgcttgagcgggatctgcgccagggccattttcaggatcgcatcgttcttgaccagtgccgaggcgaacttggtgtcggtcaggcctggcagcaaggcgttgcaacgaatgccgaacgccgcgcattccttggcgaagactttggtcatgttgatcacggcggccttggtcaccgagtagatgccctggaacacgcccggggaaatgccgttgatcgacgccacgttgatgatgctgccgccgccgttgtcgcgcatcagcttgccggcttccaccgacatgaagaagtagccgcgaatgttcacgtcgacggttttctggaaggcgccgaggtcggtgtccagcacgttgcagaattgcgggttggtggcggcattattgaccaggatatccaggcggccaaactgttcgcggataccggcaaacacctgggtgatctgctccatttcaccaatatggcaggccacggccgtcgctttaccgccgtcggcgatgatcgcgtcagccacgtgctggcagccttcgagcttgcggctggacacgatcacgtgggcgccttgctgggccagcaacttggcgatggcctcgccgataccacggctggccccggacacgaatgcaattttgccgtcgaggtcgaacaggtttgtcttggacatagcggttccttaaagagacgatttgctgatgacagtcaggctcatttgctccagcagcttgttcatgtggatgaactgcgagaagcgtttgtcctgggtctggccatggaagaagcggtagtagatctgctgcacgatgccggccaggcggaacaggccgtaggtgtagtagaagtcgaagttgtcgatctggatgccgctgcgctcggcgtagtaatcaacgaactggcggcgcgtgagcatgcccggcgcattgctcggctggcggcgcatcagttgcaccggtgccgggtcagccgcctcgatccagtaggcgagggtgttgcccaggtccatcagcgggtcgccgagggtggtgagttcccagtccagcacgccaatgatttgcatcgggttgtgcgggtcaaggatcacgttgtcgaaacggtagtcgttgtgcacgaggctggaggtcgggtggtcggccggcatcttgtcgttgagccaggctcgcacggcttcccagctcggggcgtcgggggtccgggctttttcgtagcggtcgctccagccgcgaatctggcgttctacatagccttcaggcttgccaaggtcagccaggccacaggcgctgtagtccacctgatgcagctcaacgaacttgtcgataaagcttttgcacagggcctcggtttttgctgcgtccaggcccagttcggcgggcaggtccgagcgcagaatgatgccgttgacgcgctccatcacatagaactcggcgccgatcaccgactcatcggtgcaatgcacgtaggctttggggcaatacgggaagccgtccttgagctggttgagaatgcggtactcgcggcccatgtcgtgggccgatttggctttgtggccaaacggtgggcgacgaagcacgaattcctggcccgggtattcgagcaagtaggtcaggttcgacgcgccgccggggaactggctgatggtgggcgtgccgctcaagcccggaatatgggctttgaggtaagggtcgatcaggttggcatccagttcttcgccggggcgaacctgggtggattggtcgttaagcgccatgcttatcccttctgcttattctaaaggccttggactattggctaatctaatgcgcgccgccgccacgcgacaaggtcggggcggcttaataggttagcgtgttggaggatgatcagcgggcctgatgtgctcaaatcaccagcatcgcgcggccaccggggctgcaggacaggttgccgccgatttcgactttcgcaagatcaatgcccaggccggcaagcaggttattgacgatagggtcgagcaggggccccagcagcccggcaatcagcccgcccagggttgaaagcaagccgttgagcaggcccgtaaccacgctgagcaaggcgcccagaaggctggaaatttgcggtgcatggctgatcagctggatgccggtgagtgtctcgttcaggctgctgacgacattcgacgcggcgaactgataatactggggtggctgattgatcgcaggcgggttggtgtaggtgtgcgggcgctgtgtcctggcgacattgctgtcaacgcgtacgcccagcccgccggcggcgaaggcttgcctgtcgctgcacacgttagtgccgcgcttgcaggttttggtgccgatatccaccaccggatactcgttgactttgagtatttctgtggatgagaacaggtttttggggtcaacctggccaatcatcacgcgcaaggccgaggtttcgcccaacaccgataaggtcttgttattgctgtcgcagctgtaacccgtgacctctgcgctgccccctgcggcctccagtgcgatgtcgagcttgtcgccgatttccaggctggagacgacacaacaattggggtcgaacagcccgaaaaggccgcccaagagatcattgagaagctgtatcaggccccccagcacgttattgaccagcgtcacgatcggcaacttcaccgaaatcaacgtgcgcacttgagccgtcctgacaaaaatgggctgtgcggcgatgtttttcgggttgccgatgcttgagagctgcgcgggctcgatgaccttggtcgacacagtgacgccgatcagccccagcacgtccaccggcaactcgaccgccacggcgctggccttgttcgacagttgcacaaacccctggatcagattgaacagttgcaggtccacgttcaacgcacttttatcggtaccgttctggatattgatcaagtcgcccaggtgcaggatttgcgtgcctggcgcaatcagcttgatggcttccaggttgttgatcaccaccttgaccgcatcgctgcccagtttgagcacatcgatggcggcctggatcaactggccgacggtggcgtcagtcttgagcaactggtcgtagttgccggcgctgacgttcagacgaatggccagcgcatccaggtagctgagcaagctgatgttcgtgttgagcaagccattccagcccacagcatcgagttgcaacttgccaccgagcaagccgccgatcagtgcgttgagggccaccgatttggtgctgtccacggtcaacaaggtactgcgcacggtgagcgacgccaccggtggagcgggtgcggcagccacggctgtggcgctcagcagcgtggtcaggctcacggaccgtgaggagaacagagtgaacacgccatgggcaatgctggtggggacgcggtgggttgcaatcacttggattgcgtcggccttggccgggttggggctgaaggtgcgcatgaagtcggcacccgtggccagggtgccgcacgcggtggccagggtgcgatcggcgccgaccgcaaagttattgcgttgggcgctttcaatcacaaactgcgcggcgttgttattcggcgccaggcatttgcccccgcggcttacggcttccagcgccgcggtgtcagccacacgctgcagtttgcgtttctccagatacaagcggccgctgtcgaccaccaacagtagaaacaacaacgcgattccaagggtaaaagcgcccatcaggccgatggcgccgcgctggcgggccgggccgagtccatggccaaacattgtgcgttccttcgccggtcatgcaccggcgtcctgagcatccccgccaacagtgtagacaggttttgcgcaggcgctggctattcgctactagttgcgcggcggcagcgcaaccggcgtgagcaccgggcggccggcaaagtattccaccaggttgtcagccacgcgctgcacggtgtcgtgggcggcttccggcgacaggccggccacgtgcgaggtgagcacggtgttgctcagttttttcagtgcatcgggcaccttgggctcatcgtcaaagacgtccagtgcggcgccgccgatacgtcgctgctcaagggctgcgaccaggtcggcggtgaccaccacactgccgcgtccaatgttaacgaggtagccgtttggccccaaggcatccagcgcgtggcgatcgatcaagtggcgcgtgctggcgccgccgggagtggcgaggatcaggaagtccgaagtacgcgccagttccacggcggtggcgcaataggtgtagtccacatcgtcacggggttggcggttgtggtagctgatttccatgccgaaacccagagaagcgcgcttggcgatctccatgcccactgcacccagcccgagaatgcccagttgcttgccgcccagggaagggcgcatcaccttcggccactcgccgcggcgtacggccgcgtcggtctgtggaatgccgcgtaccagcgacaacaacagcgccatggcgtggtcggccaccgagggggcattcaccccggcgccgttggtcaccacaatcccacggttgctcgccgcctgcaggtccacgtgctcatagccggcgccgatcacgcagatgatctccagcaacggcagtgccgcgatttcctcggcatacagccccagcggcccgcgcgtcagcaccgccttgatttgcccgccgtgggccttgatcgcttgggcgcgttcggcaggcgtcggtgccagaatcacatgaaagtcattgctctcgatgatttgcaggtattcgttgatggtttcaaccaggaccagaacggtggtggacatcgcaaggctcttcctgaagggtttgagaggagggagtatgcgggatttgtaagagggagcgatttgttccatcagaaaaaatcccgcatcagtcatgctagaacgcaatattcagtgcctttacccgtttcacaaatgccccggccagggtcgtattgtgatgttcgatgatcgcctcggctttgagcgccggagtgtccatgcaggtatggccgtcttccggcagtaccaccgagaaccccaactccactgccacacggcaagtggtgtcgatgcaaaattgggttttcatgccgacgatcaccaacgcttcaacgtgcaaagccgccagttgctgcgccagatcagtgcccagaaagcagctcgggcgagttttattgaacagggtatcgcgggaagcatcgacttcaaggcctgggtacaactgccataacgggcttcccgcttcgatgggcgaaccggccgggccggtatggcgggcggcaaagatcggcgcgtctgcgtagcgtgcacgcctgatgagctggttgatggtcgccagcacgcgctcgcgctcgaagggtttttccggcccgtcgtacaggccattttgcatatcgataatcaacagggctgcgctcatggtgttgctccttgtggtcgccagacagcggagcaataaaaaggccccgtccattcctggcggggcctctggttgtttcccgggtgtgtctagttcaggcacccacggcaaccgcacgacccgccagtggcggtcgtggtggtgctggtgaggcggcgctgaataaggttcatggcccgatcatgctggggcgggtatttggctgtcaacgggcgtggcggatttcttctcgggcaaaagcgtgttctgcgcagctgtaaggaactcatccgacaaagcatttccgcgcgtagcacgggcgagggtcagggcgccgatcatcatcgcgtacttggccagcaggttctggcggtcgtcatcctgaagctgcgcaaaaatagccagcgagtgctctacgccctcgatgaaggcgtgttgcaaggctgtgtcggcgggttcgtggcacatatccggggtgaatgccgaaatcgggcagccgtcgccggggttgtcgcggtgggttgccgagaagtacgggcgcaaaatggcatcgcgcgcggactgtttgtccgcactgctggtgatcttttcctgccagccaaggtttgattgctcgaaagccttctggcacgcctcggtagccagcgcctccttggacgcaaagtgcccgtagaaaccaccatgggtcagcccggcggcagccatgacgtccgacaggctgatgccatgcagcccgcgctcacgaaacaggtgcgtggccgcctcgacgatgatttcgcggttgagttcggcttgtttgcgggagacgcgaggcatggcagggttctcggaataaaaggcgggcactgctgaaaagtacaggaacggcgcggattctaaaatagatttgttcgggaatgtattattcgcgtgacgctacagcccgctgaaaccgtcgcttatggacgttcttgaagtgctgcaccgacccaccgttcctcagctaagtctttgcttattcacaagaatcccggacaatccggccccttctatggccgggacgctgcctgtcaggtttttctgactcgtcctggccatgtttatgcggagattccaccggatgaatgatcaggccaatagcgtcgacgaacgctacgagacgacacctgcaacgctcacaagctggagccgccaggacaccacctggatgcttggcctgttcggcaccgccattggcgccggtactttgtttttgcccatcaatgcgggcctcgggggcttttggccgctggtgatcctggcgttgctggcgtttccgatgacgttcttcgcccaccgtggcctgacccgtttcgtactgtctggccgtaaaggctccgacattaccgacgtggtcgaagaacatttcggcatcaaggccggcgcgctgatcaccttgctgtactttttcgcgatcttcccgatcctgctgatctacagcgtggcgctgaccaataccgttggcagctttatggagcatcagttgcatatcatgccgccgccacgggcgatcctggcgtttgtgctgatcctcggcctgctggcggtggtgcgttgtggtgagcaagtcatcgtcaaggccatgagcctgatggtgtatccgtttatcgtcgccttgttgtttctggcggtgtacctgatcccgcactggaccggcggtatccttagcacggcgcgtgaagttcccgcgccgtcggcgttgctcagcacactgtggctggcgattccggtgatggtgttctcgttcaaccattcgccgatcatctcggcctttgcggttgaccagaagcgccagtacggggcaaacgccgatcaacgcagctcgcagattctgtcccgcgcgcacctgttgatggtggtaatggtgctgttcttcgtgttcagctgcgtgctgactctgtcgccggcacagttggccgaggcgaaggcgcagaacctgtcgatcctgtcgtacctggccaaccacttcaataacccgaccatcgagtttgctgcgccgttgatcgcgtttgtggcgattgccaaatcgttcctgggccattacatcggtgcgagtgaaggcctcaaggggttggtgctgaagaccggtcgtcgtccgagtgccaagcgtctggaccgcatgacggccgcgttcatgctggtggtgtgctggatcgtggcgacgttgaacccaagcattctcggcatgattgaggcgctgggtggtccgatcattgcttcgatcctgtttctgatgccgatgtatgccattcgtaaggtgccggctatggccaagtaccgtgggcaggcgtccaatgtgtttgtcacggcggtggggttggtggcgatcagtgcggtggtttattcgttttttgtctgaggctggtgcggtctgtctgactgcaccttacttgcgatagcgagtgtacatatccgttgctgcggtaacggccacttagggttccgctcttacagcggctcacttttggaaagacccaaaagtaagcaaaaggtcttcgccccaacactcggtgcctcgcctaggctcggcatgccctcactccggctttggagcgtgggccgccgcgatgggccatccttggcccagcgcggctaacccggcgtcctgccgggttacccacgctccaaagcctgcgttcggccagcgtgtttgacggggcgcctaagatcaaaatcaagatcaagagcgactcgcttcgcatcgtggatacgcggtccctgtaggagccggcttgccggcgaaaaacgtgagatcgccgcgtttatccagatgtacccccatcaccgttaacgaccatcgccggcaagccggctcctacacgaccgcgtttgcacttgcctttgctctacaccactcaagccggctgtcaggccgctgtgcttttgcttttgatcttgatcttaagcgccccgttaaacacgctggccggaattcgacagggatttggggggtaaaccggcagggatgccggtttagccgccccgcgccatggatggcgcgtggcggcggccccccaaatacctggcggattacgggcacaccgagcgtgagcgaggtgccgagtgttggggcaagagccctttggttactttggggctcttttccaaagtgacccgccgtaagggcggaaccaataccagccgttacccaaatgaaggatatgtacccagtctcacccatatcccaggcataaaaaaacgccgcgtacctcacgatacgcggcgcctcttcacatcaacaccttaggcttgaatcaccgggatgttggcgcttgctgcgattttacggaactcggcgatctggtcgaagttcaggtagcggtaaacgtcactggccatggtgtccagtttcgctgcgtaacccatgtactcttcaaccgtcggcagacgacccagtgtggaagcaacagccgccagctcagccgaggccaggtagacgttcgcgccgtcacccaggcggttcgggaagttacgggtcgacgtcgacactaccgtcgagttcggctctacacgtgcctggttacccatgcacagcgagcagcccggcatttccatgcgcgcgccagccttgccgtagataccgtagtagccttcttcggtcagttggtgagcgtccatcttggtcggcggcgacagccacagacgggttggcagctgacccttgacctgttcgagcaacttgccggcagcgcggaagtggccgatgttggtcatgcacgaaccgatgaacacttcgtcgatcttctcaccggcaacgctggacaacagacgggcatcgtccgggtcgtttggtgcgcagaggatcggctcgttgatctcggccaggtcaatctcgatgatttcagcgtattccgcgtcggcatcggcttccatcagctcagggttcttgacccaggcttccatcgcttgggcgcgacgttccagagtacgcgggtcaccgtaaccttcaccgatcatccagcgcagcagggtgatgttggagttcaggtactcggtgatcgactctttcgacagcttgatggtgcaaccggcagccgaacgttcagccgaggcgtcggacagctcgaaagcttgctccagcgtcaggtcgttcaggccttcgatctccaggatgcggccggagaaggcgttcttcttgcctttcttctcgaccgtcagcaggcccgactggatcgcgtagtaaggaatggcatgaaccaggtcacgcagggtgatgccaggtttcattttgcctttgaagcgcaccaggatcgattccggcatgtccagcggcataacgccagtggctgcggcaaacgcgaccagaccggaaccggccgggaacgagatgcccatcgggaaacgggtgtgggagtcaccaccggtacccacggtgtccggcagcagcatgcggttcagccagctgtggatgatgccgtcgcctggacgcagcgatacaccgccacgggtcatgatgaagtcaggcagggtgtggtgggtggtcacgtcgatcggctttggataggccgcggtatggcagaacgactgcatcaccagatcggtcgagaagcccaggcacgccaggtctttcagttcatcacgggtcattggaccggtggtgtcctgggaaccgacggtggtcatcttcggctcgcagtaggtgccagggcgaacgcctttgccttccggcaggccgcacgccttgccgaccattttctgtgccagggtgaagcctttaccggtgtcgacaggggcttcaggcagcttgaacaggtcggttgggcccaggcccagctcggcacgtgccttgtcggtcaggccgcgaccgatgatcagcggaatacggccgccggcgcgaacttcgtccagcaggaccggggtcttcatttcgaaggtggtcaggacttcgtcggtgccgtgtttgcagactttgccagcatgcgggtacaggtcgatcacgtcgcccatgttcatgttggtgacgtcgaattcgattggcagagcgccggcatcttccatggtgttgtagaagattggagcgatcttgctgccgaagcagaagccgccagcgcgcttgttcggcacataaggaacgtcgtcgccgaaaaaccacagtacggagttggttgccgatttacgcgacgaaccggtaccgaccacgtcaccgacgtaggcgatagggaagccttggccacgcatctcttcgatctgcttcatcgggccggtcttgccttgctcgtccggcacgatgccttcgcgggccattttcagcatggccagggcgtgcagcgggatgtccgggcgggaccaggcatcgggagccggggacaggtcgtcggtgttggtttcgccggtgaccttgaacacgcgcaggctgatcttgtcggccagggtagggcggttgctgaaccactcgccgtcagcccaggactgaatcacggctttggcgtgtacgttaccgttcctggctttttcagccacgtcgtggaacgcatcgaacatcagcagagtgtgcttgagttgagcagcggcgacaggtgccagggtggcgtcgtccagcagctcgaccagggtcacaatgttgtagccgccttgcatggtgccaagcagttcaacggcgcgttgcttgctgatcaggggggaagtggcttcgcccttggccagggcagacaggaaaccggccttgacgtaggcagcttcgtcaacgcctggtggaatgcggttggtgatcaggtcaacgaggaattcttcttcgccagccgggggatttttcagcagctcgaccaggcctgcggtttgttcggcgttaagcggctggggaacaatacccagtgctgcgcgctcttcgatatgtttgcggtaggcttcaagcacagtttttaccctcatcagtggtcccacgggacgctcatccagaaatgatcggcacgcatgcgctcgggggctttttgggccgcaaagccagcgctgccggcatttctcacagaagctgctttcaaagttttacgcctgcagagcggagctgatgagggttggcgctggctatttaccgggtaaataaccgtcgccaacaccgctctgaaggaacgactgtgctcgtgacgctttgaaaacagcttccaatggattattggcgccttacaaggccggatgattctacggcaaaaaaattctaaaggtaagttgccttgccaagtttgcagggtgatgaaggttagacaaagggctaacatggcgcactgttttgctgatttgcgtgttgctgcccatgtccaaccacaccatcaagaccccttgcgtcggcctgtgctctacggtttacggcgatctcgtgtgccgtggctgcaagcgtttccaccacgaagtgatccagtggaacggctataacgaagaagaaaagcgtgcggtctggctcaggcttgagcaattgttggtgcaggtcatggcgggcaagctcgaggttttcgaccccaaggccctgcgcgggcaattggaacaacgcaagatccgctttgtgccgcaccagtccgagtactgctgggcctaccagttgatcgcccggggcgcgcgggtgatttccaatctggaagcatatggcatggtgctgttgccggagtttcgcgactgggcgttgccggatttgcgtgacgccattgatcgggagttttttatcctgtccgaggcgcattaccagcgctatatcgcgccggggttcttgcgcgatgctctcgcgccctgactgaaccggtcaatgtgggagctggcttgcctgcgatagcggtgtgtctgtaccgaaaatgtcacctgatacaccgttatcgcaggcaagccagctcccacaatggatactcattgtctggaaggtgttggatcaggccttggtcgccaactcctccagatggtccatcaactcctgaggcttgagcaccagcacatcaccttccaccgcatccagcaccacctccgccgtattcccgatcaatgcacccgagatcccggtgcgtgccacggtgccaatgatggttacggcagcattcaatgtatgcgccgcatgggggatcagcacgtccgccgggccttcttcgatatgcagatgggtgtcgtcgatgtcaaattcggcctgaaataccttgcactgctcgcgatagcgcgcctcgatggtttccttgagctggaacgtcgggtccgctgccgacagcatcggcgacggatgggcgctgatcacatgcaactgcgccttggccaaccgtgcaatgtcgaagccgtgatcgatgatggtgttgtgcagcgcctggtgttcgctgtcgctgttgcccacgtcaatcgccgccagcaccactttgtcggcccacggcgtggcggttttgaccagcagcaccggggtggggcagtagcgcagcagcttccagtccgcaggggtcagcagggcctttttcagcgggctgtcggggaagtgctgtttgatcaccaggccgcagccttcggcttgctgaacatcaatgatggtttcatgcaggctgtcattccatgcctgctcggtggtcacgctgtagccgtcctcctgcaagcccgatttgagcaggctgagcagcgccgagtgctcgtgtttcttgtcgcacaccagcaagtgcaggtgcgcgccggtgaccccggcgatcagcttggcgcgcttgagggccaggctttccgaatgttcgggctcgatgaccaccaaaacgctgcgaatggcttgcatgctcgggatctccagaaaaggggcgtggaacaactatagttgctggtgggcgcacgtcatgttgatacacatcaaggccggtggctggtggtctgcggcgtggtcggtataatcggcgcccttttgtgacgcttttgcccgtgagcccgatgaacctgcccgaaatccacgaattcctcggctgccgcacccctgacgcttgggtccaggccgcgttggccgatcaggaaaccctgctgatcgaccacaagaactgtgaattcaaagccgccagtaccgcgatgagcctgatggccaagtaccacggccatgtcgacctgatcaacatgatgtcgcgcctggcccgtgaagagctggtgcaccatgaacaggtcatgcgcctgatgaaaaaacgcaaggtcgagctgcgccaattgcacgccggccgttatgcctcggcgttgcgcaaagtggtgcgcacccatgaaccggtcaagctggtggatacgctggtggtcggtgcgtttatcgaagcgcgcagttgcgagcgtttcgaagcgttggtgccgcatttggacgaagaactcggcaagttctacttcggtttgctcaaaagcgaagcgcgccattttcagggttatttgaagctggcgtaccagtacggcgacgcgaaggacatcgcccaagtgatcgagcgggtgagggcggcggaacaggagctgatcgaatcacccgacgtcgagttccgctttcacagtggcgtgccagcctgaagcgacggctacgccgatcagtgtggtgatccccaccagcagcaggatcaccgtctgtgtgcccagcggggctgccagcaccgccacgagcaagcctgccagcggctgggacaggttgttgagcaaggtgatcacaccgacggtcttgccgaaatcctgcaccgggatcacgcgttggcgaatgctgcgctggtacacgctgaacattttgtcgaaaccgatgaccagcagaaaaccgagggtatacacccacagctgggcgctgatggcggtcagcaaggcccccagcgtcatcattgaataagacaggccgcccagtactttcagggtcagggtggtgcgcgccaggtaaaacagaatcacgatggtcaccagcgcgccggccgtttgcagcagggcgtaggcatgctctcccgcggcgtattggccggtatacatggcggcggacgtcgccagcgtgacgccgaacaccaggttgacccccgccgccagggtaacgatgcgcctcaactcggccaggttgccgatgtgccggaaggcgacgcgcaacggttgcagccagatgtcccggtgttgttcaaagcgctccagctccaccacgcttgttttttgccacacgctcatcgccaggtccgccatcacaaaaagcccggcgacggccaggactacccaattccagctccaggcttgcagcatcagtgcggccaccagcggccccagcaccagcccgctctggtcggcgatttgtgagtacgacaaggtcttggtgtaggtgtactgtttgaaaatgtgcggcatcagcacttcccgcgccatgatgccctgggtggtcagcaccccgcacagggcggagaggatcaccagccaataaataccgtcgaacaccgcatgcaacgcgacagcaaccacgcacaccagtgcccggtagatctggctgatatgcaggacccgcacgggtgaaaacttgtcgcacaccgcgccgcacaccggaaacgccaaaaaacgcggcagcgactcaatgaagaaggcgaggcctgcccacgacacgctgcgggtggtctgaaacacaatgagcggtacgataaacaacagaacctggtccgccagccgcgacaggaacagcgaaacaaagaacgccaggtaatccttgcgcatacctctccctgtcaatggcgttaaagactgcgggctttttgttaaaaactcttaaaagcatgaagcttcgtcggccggtgatggcctgttgcttctgctggtcagcttgccacctataatgcttgcacttcaatccgcgcttgcacactgagaacttatggaaaacctgggtctgggcaaagtcctgctcgttgaggacgatgaaaagctggcagggctgatcgcacactttttgtcgcaacatggtttcgaggtacgggtggtgcaccggggtgatgaagccctggctgcgtttctcgatttcaaaccgaagatcgttgtactcgacttgatgttgccgggccagagcggcctgcacgtgtgccgcgaaattcgcaatgtgtccgacacgcccatcgtcatcctgaccgccaaggaagacgacctcgatcacatcctcggcctggaatccggcgcggacgattacgtgatcaaacccatcaaaccgccggtgctgctcgcccgcttgcgtgccttgcagcgccgccaggtacctgaacccacggtgcgtggttctctggagtttggccgcctgtcgatcgatcgcagttgccgggtcgtcagcctgggcggtgagaagatcgatctcaccaccatggagtttgaactgctgtggctgctggccagcaattccggaaatatcctttcccgggacgacatcctcaaccgcatgcgcggcattgccttcgacgggcttaaccgcagcgtcgatgtgtatatcagcaagctgcgcggcaagctcaatgacaaccctcgcgagccggtatgcatcaagaccatctggggcaagggttacctgttcaacccgtttgcgtgggaggtctagatgctgcggctgtttttgcgcctgtatgtgatcctggcgctagggttggcgggcgcgatctggctggtcaactacaccttcgatgaactgcttcctgaagccaacgaggtgtataaccgcgaagcactgcgtggcccggcctatggcgtggtcgagcaactgcgccctttgcagggcgccgcccgtgaggctcgcctggccgagcttcagccccattacggtttgcgtctgcagttggtgcagcgtgacgccctggcgttgacggagcgcgagcaggcatttctcgccgatggccaactggtggtgcgtggggacttcatggagttcatcacccgtattgacgatggcccgcaactgctggacatcaagctgccggaagagcccaaatggttgtacctgtgggcctacggttttctgggtgtgagcctggcgatcgtcttgtatttctgggtgcgcccgcactggcgtgacctggagcatatccgcctggccgcgcagcgtttcggtgacaacgacctcggttcacgcatcctgctgccgcgccgctcgaccgtgcgcgagctggccgggcacttcaaccagatggccgaacggatcgaaagcctgatcgccaaccagcgcgaattgaccaacgcggtttcacatgaattacgtacgccgattgcacgcctttcgtttgagctcgatcagctcaaacaacaggccgaccctcggcagagccgcgcgctgattgccgacatgtatgccgaccttggcgagctggaggaaatggtctctgagttgttgacttacgccagcctggagcgtggcgccacccaggtgacccgggaaaaaatcgaggcccacagttggctcgacagtgtgatcggcagcgtggcgctggaagcagaggcggccggggtgcagttgtcgctgcgcacctgtgaggtcgacttcattctgattgagccgcgttttatggcgagggctttgatcaacctgctgcgcaatgcgattcgctatgccgagcgacgggtggaagtgtcgctggtcaagtttggcagcggttatgaagtgcgcgtgaatgacgatggcccgggtgtgccgctggaaggccggtcgaagatcttcgaaccgttcatgcgccttgatgccagccgcgatcgccgcacgggcggtttcgggctgggcctggcattggtccagcgggtcagccaatggcatggcggaaaggtggaagtgctggattcggagtggggcggggcgtcgtttcggatgacctgggcgtatgccgaatgacggtgaaagagatccaatgtgggagccggcttgcccgcgatagcggtggatcagtcaatggcttgttaactgacagaccgccatcgcaggcaagcccgctcccacaggtttgatggggttacccgatcagaaggtgtactcaaccatccccatcagcgacgtctgcaaccgtcgctccacaatcgggctcttgcctgcttcgtccgccaggtactgcacgtccagcagggtcgagaacttggtgttatcgctgatcggtacgctccacaccaggttcatgccattgctgatgttgcccgcgccggccttgtattccttgaaacggctgcgcgcagcctggtcggtggttacgccgtaccaggtttgcaggtattgacggtcaccgaagtggctggtgacgtttgcgtcgatggagccgtagttgccctcgtaaaggttggtgcccaggctcagttccaagtgggtgaacgccttgccgttttccttgtggtcatcgtccttgagggcgtgctccagggtggcaccgacaatcacaccacccaggttatagctggcattgatacccacttgcccgcgcgccttgatctcgcccatgcctttgaggcgtttggagccagcatgcatgctttcatttttatctttgcgtgaaccactgatacccaaataggtgctgaaactcagggcattgccttcgtaaccccagcccagccctttactggtatcgaggaaaatcccccatgggctgacgattgcgccacccaccaatggcgcggtcatgcgttcgtcactgccactgtagcgaggcatgttgccgacgccggccttgaggctgtattgccagtcttcggccagcgtgcggtcggcgctggccaacaggcacagcgaggtgagcgacaggcaaagtgttcttgagcgcataaaggtgttcgtccattttaaaaaaacaaaggtttgtggggggattgcgtacgtttaaaggaataaccggaggcgctgagcccattgacctgccggctcacggtgtcgcccaggccgtagccgttgccggcaagcaccgcatgagcgttatcgatggggagcaggatgtagtcggtcagtggttcatcgtgcaattggccgcgaatcatcaggaaaccgttctccaggcgcacactgatgccgctcagcggcgcatcgggttcgtgggtgttcagtacctgataggtgccgatggtgtcggcccaggccgctggcaacggcggcgggtcgatgcgttcgccgatggcgatgcgctggccgtggctgcgggccgtcagcatctgccggccctgcaccgtgatcacgtcgagttgcacgcggcccagctcgccaaggtctttgcgccaaaagccgaagacggttttctgcgcgcgcagccagccttgatcgtcgcgcaacaactcgaaatcgaagcccgccaattcgccggacaggcgatggctgtcgtccttgatccggaacacgccccacgcggtggcataaaagccggccaggcgcttgcggtcgacggccgccggtacgtggcgcaacttgaggccatggccgggcgcctggcagtcgtcggcgcacacgggctcgccggtttgcgcctggagcatcaggcgcagggtgtcggtggacagcgacaccaccatgtcctcggcgttgctgtcgttggccatgatgatcacggccagttgctggtcggggagcagggtcaactgcgcggcaaaatcatcgcccccgccgctgtgctgccaggtgcgcacgccggggccgattggctcatcgccgcacggcgcgaggaaccagcccaggcccatctggcaatcgaagtcgagggcgttgccggtgttttgctgggtgaacatttcgtcgatcgacgcgctggccactacctgcttgcctttgtacacgcctttggcgaacagcatctgcacgtagcggctgaggtctctggggctcgcccacaacccgctggaagccaggtcacgcacttgggcatcgctgctggccaagccgtcttcgtaacccagggcacggaagctcagctgtgtgccggtgccgacaaaacttgactggttcatttccagtggcttgagcaggcggctttgcaattgggcttcgaagcttttaccgctgctgcgctcgattgccgcgccaaccagtgagtagccgaggttggaatacgccacctgggcgcccggcgggctgctcaaccagacgccggagacgcgcatcggcatctggcccatggcgtaggtgctgcgcaggtcgcgcaggtgttcactgggcaggccggattggtggctgagcaggcgccgcaaggtgatcgcgcggtctgccgcgccttggtcgctgtggaaacgcgaacggacgtagaactcgcgcagggtttgctggatcggtgcgtccagggccagccgttgctgctccaccagctgcagcgctgccgtcgcggtcagcagcttggaaatgccaccggcgcgaaaagccgtgttcggcgtcaccggtacgccctgggccttgtccgccaggccgaaaccccgcgcccagatcagctcctggccgttgaccagggcaatcgacaacccggcgatattgtcctgcgccatctcccggggaatgcgcgcttgcaggtaacgaatgatcgcgccgtagtcaccttttggaatcgacggcggggcgggcggctgcacgtggcaaccgagagtgcccaacaggcaacccatcagtggaataccgcgcaatgtacgtagcatgaagagcacccggaaggtgatttggatgctcaaatgctaggggggcgtggctcggaggtctttgagagctttgtcgagaaactgtcaaagactgttaactagcgggtcaaccccagccgctcgtgccactcggcgatggacgcttcggggtattcgtcgaactgcaaatcgcccttgcggacactgacttcaatccacggcgctttggatccgagcatcaaatgggtatgctgcggcggcactggcagcggggtatcgatggcggaggcaaacgggtggatcagctgcggccactcggggctgaacagccacagggcgctgccgcactgcgagcagaagtgccgctcggccgtgctggcatgggcgcggctggcgccttccggcttgagccgggcgtggtagatggaaatctgcttgcggccttgtaccttcaagctgtcagtgtcaccggcgaggttgatcgcatagccgccaccgccctgggtcttgcggcagatcgagcagtagcagcgctggtaggggtaggggtgggcgctgttcaggctgaacgtcacggcgccgcagtggcaggatccttctaatttcatggcgagtctcctctggcaaggtgactgatcagcttaggcgctctcgggcatcaaggtggcaatcaatgcgcgaatggtgccgggcaacgcctcaagctcgcgcaccaggatgctgcgctcgcgaatcgcccagggttcgtccagtttcaccgcgaccagttgcatggtccggctgtgccggatggcggcggactcggggatgatcccgatccccactcccgcctcgaccatccggcagatcgcctcgaagctcgacacctggatgcgcagcgacaaatgtttgcccaggcgctctacgtgttcacgcaaaaaggtcaacaacgtactgccttcatgcaggccgatgtgttggtaagtcagcgtttgctccagggtcaccgacggttgctgcgccaatggatgccccacgggcaccatcagtaccagttcatccgtactgaaatgcagcacctgcaaacccgccgcttccacggggccggcaatgatgcccatgtcgctggtgccatccaatacgccgcgcacgatatcgcgggacaagcgttcctgcaggtcgacggtcacgccggggcgttgtgacaggaagcctgcgagcacttcgggcaagaattcggtgactgccgtggtgttggcaaagatgcggatatgcccggccgaatccacgccgtattgggtgaactcgcttttgaggtaatccacctggcgcatgatcagccgcgcatggtgcagcaggcgttcgcccgccggagtgatctccacgccacggctgtcgcggtacagcaggcgggtgtcgagctggccttcgagcgccttgatccgcgcactggcggcggccggcgagaggaatgcgcgcttggcgccttgggtcaggctgggggattcggcgatgtgaataaacaggcgcaggtcggccagatcgaagtgcatgcaagacacctatttttttggcaacgatgacgagcaaatgtgggagctggcttgcctgcgatagcggtgtgtctgtaccgacaatgctacctgacgcgccgctatcgcaggcaagccagctcccacacggaatcgggttgtatttatgggtggcgttcagcataaccgaacgctggtttattgaaatgcaaattctcagaacgggcaggcgcttgcatgatccggggcagacactcactgcccgaggacctgcccccgatgagcgccaccgattggatcggccgaagcgaaactgcccacgaccacttgagccataacctgctcaagcgtattgccgcgacgttcggtgaaagcgtgccagaagacggcgcggacatcccaccgctgtggcagtggtgtttcttccaggacccgctaccggaaacggccctgggtattgacggccacccggcccggggtggcttcctgccgccggccgacaatcgcaaccgcatgtgggccggtgggcgcatcgagtttttacatgcactgcgtgccggtgaggcggccacccgggtgtccacgatcacgcaagtcgaagaaaagaccgggcgcaccggctcgttgctgttcgtcacggtgcgccatgactattcccagggcggccgcctggccatccgtgaagaacaagacatcgtctaccgcgaacctacgccgcccaaacaaggcagcggcgaggcgctggggcagggcgaatgggccgaggccgtcgaccccacgcccaccctgctgtttcgctacagcgcggtaaccttcaacggccaccgcattcactacgactacccctatgtcaccggcaccgaaggctattcggggctggtggtgcacgggccgctgattgccaccttgagcctgcgcgccttttgccgcgcacacccgcaagcctccttgcgccggttcgcctatcgcggcgtgcgcccgttgatcgcgccacagccgtttgaagtcgcagggcgtgtcacgcacagcggtgtcgccgaactgtgggccggcaatgccgatggcctggcgcaaacagctgaagtccacttcgaataatcacagaacaacaggcggagagccgtaaatgaacccgaatgacaatgaagaactcaacgccatccgcgaaggcgtgcgcgccttgtgcgccgagttcgatgccgcttactggcgcaaggttgatgaggaaaagggcttccctgaagccttcgtcaaggcgctgaccgacgccggctggttgtcggcgatgatcccggaagaatacggcggctcgggcctgggcctggccgaagcctcggtgattcttgaagaggtgaaccgctgcggcggcaactccggcaccgtgcacggccagatgtacaacatgttcaccctgttgcggcacggcagcgaagcacagaaacgcttctacctgcccaagctcgccagcggcgaattgcgcctgcaatcgatggccgtgaccgagcccaccaccggcaccgacaccaccaagatcaagaccaccgccatcaaacgcggcgacaagtacgtgatcaacggccagaaggtctggatctcgcgggtgcagcactccgacctgatgatcctgctggcgcgcaccacgccgctggccgaggtgaagaaaaaatccgaaggcatgtcgatcttcctggtcgacctgcgcgaagccatcggcaacggcctgacggtgcagcccatcgccaacatggtcaaccacgaaaccaacgaactgtttttcgacaacctggagctgcccctcgacagcctgatcggcgaggagggtaaaggcttcaaatacatcctcgacggcctcaacgccgaacgcaccttgatcgccgccgagtgcatcggcgacggccgctggtttatcgagaaggccagcgcctatgcccgcgaccgcgtggtgtttggccggcccatcggccagaaccagggcgtgcagttcccgattgccgaagcgcatatcgaaattgaagcggcggacctgatgcgctggcgtgcctgcgaggaatatgacagcggccagaatgccggggccagcgccaacatggccaagtacctggcggccaaagcctcgtgggaagcggccaacgcctgcctgcaaacccacggcggtttcgggtttgcctgtgagtacgacgtggagcgtaaattccgcgagacccgcctgtaccaggtggcgccgatttccaccaacctgatcctgtcctacgtggccgagcatttgctcgaactgccacgcagtttctgaggcctcgaccatgagccatacccaagccttgtgtcggtttctggccgatttgagctatgcgcaattgcccgaaaacgtgctggcgcgcaccgaagacctgtatctggactggctcgcctcggcgctggccagcaagggcgcacacccgattccgctgtttgagcgctatgcgcaaacgatgggcccggccgatggcccggcgcaggtgatcgtcaacggcggcagcagcagcgcttatttcgctgcgttggtcaacggcgcttcgtcccatctggtggagcaggatgacctgcacaacagctccgtgctgcacccggcaacggtggtttttcccgccgtgctggccgccgcgcaagacctcggcaagtccggccgcgacttgctgctggcctcggtcgccggctatgaagccgggattcgcatcggcgaattcatgggccgctctcactaccgcatctttcacaccacggcgacggtcggcacgctcgcggcggcagtggccgtgggcaagctgctgggtttcaacgaagagcagttcatcaacctgctcggcagcgccggcacccaggccgccggcctctgggagtttctgcgcgatgcggccgactccaagcaactgcacacggccaaggcggcggcggatggtttgcttgccgcgtacttgaccgccgacgggctgaccggtgcgcgcaatattctcgagggcgaccagggtatggccgccggcatgtccagtgatgccgagccagccaaattgtccgcctgtctgggcagccgctgggcgctgctggaaacttcgttcaagttccacgcctcgtgccgccacacccatccggcggccgatgcgctgttggacctgatgcagcgcgaaggcctcaccgccgccgacatcacccacgtggaaacgcgcgtgcaccagggcgccattgacgtactcggccgcgtgaaggtgccggcttctgtgcatcaggccaaattttccatgggcacggtgctcggcctgatcgccctgcacggcaaggccgggttgaccgaatttcaccagctggcgctgaccgacccggcggtttgcgttttccgcgacaaggtcagcatgaccctcgaccccgaggtcgacagcgcctacccgcaacgctggctgggccgcgtcaccgtcaccaccacgggtggccgcacgctgcacggcgcgattgacgagcccaagggcgatccgggcaacacgctgagtcgcgcggagctggcagacaagttccagcgcctgacccaattcagccacgcgcgcaccccggcccaggccgatgcactgatcgaaaaggtctggaacctgcgtaacgcggcgtccatggcccactggctttgaggaattgtcatgactaatcagcgaccactggacggcatcaccgttgtcagcctggaacacgcgattgctgcgccgttctgcacccgccaattggcggacctgggcgcccgcgtgatcaagatcgaacgccctggcgcgggtgactttgcgcggggttatgacgaacgcgtgcgcggtctggcttcgcatttcgtgtggaccaaccgctccaaggaaagcctgaccctggacctgaagcaggacgaggccggcgacatccttgaaaccctgctggccgacgccgatgtgctggtgcaaaacctcgcacccggcgcggcggcgcgcatgggcctgtcgttcgaggcgctgcaggcgcgttttccgcggctgatcgtctgcgatatttccggctatggcgaaggcgggccgtatgagaagaagaaagcctatgacctgctgatccagagcgaaggcggctttctttcggtgaccggcggccccggtgaggaccagatggccaaggccggatgttccatcgccgacatctcggccggcatgtatgcctacagcggcatcctttcggcgctgctcctgcgcggcaaaaccggcaagggcagccgcatcgacgtcagcatgcttgaaagcctggtggagtggatggggtacccgatgtactacgccttcgacggcgcgccacagccaccgcgtgccggtgcggcgcattcgacgatttatccctatgggccgttccccactggcgacggcggcacggtgatgctcggtttgcagaatgagcgcgaatgggcggcgttctgcgacaaggtgctgctcacgccggagctggcgaccgatgagcgtttctcggccaacttcaaacgctcggccaaccgtgacgtgctgcgccagatcattgtcgacagcttcgctgcgctggacgccgaggcggtgatccagcgcctggaagatgctcagatcgccagtgcccgggtcaacgacatgcaaggcgtgtgggaccacccgcagcttaaggcgcgagacagttggcgcgaagtcgacagccccgccgggccactgccgtcgctgctgccgccggcgcgcaatgcggcgtttactccgcgtatggatgccgtgccggcattggggcagcacagtgaaggcattcttgatcagttgggttattccactgaaaccatcgccaacctcaaaacacgcggagtcatctgacccctgtgggagctggcttgcctgcgatggcgcccaagagagcactgcaagcctcaaggccctcatcgcaggcaagccagctcccacattggaccgtgataacaaggacattcagtcatgccaaaccctcttgtgcgctctgcgctgtttgtacccggaagccgtccggagcggttcaccaaagccttggccagcggcgccgatgcggtgatagtggattttgaagacgcggtggaagagccgctcaagcgtcaggcgcgggacaaccttggcgcgtttttgacggccaacccggatgcccgcgtgtgggtgcgcatcaatgcgcctgaacacgctgagcattttgaagatgtggcgttctgcaaagcccattcaaacgtgtcaggtgtgttgctgccgaaagtggaaagcgcggcccaggtggccgtggttgccgccacgggtaaagtgatctggccgattatcgaaagtgcgcgagggctgttggccgtggctgaaatcgcccgtgcgccccaggtgcagcgcctgtcgttcggcggtctggatttggcgttggacctgaacctgagcagccaatcggccgccgcgaatttcgcccttgaccaggcgcggttggcgctgatcgtccattcgcgcgctgcgggtttggtcgcaccgctggacggtgtgcacccggccatcgacgaccccgagggcttgcgcagctcaatccggcatgcctatgaaatggggtttgccggtgcgctgtgtattcatcccaaacaggtggcggtgattcatgaagcgctggcgccgagtgcggcagatttggcctgggccaaacgcgtggtagacggtggagcacacggggcaggggcctatcagattgatgggcagatggtggatgcgccggtattgctgcgggcacagaggttgctggcagcccagctctaactgacgaaaccgaatcaaactgtgggagctggcttgcctgcgatagcggtgtatcagccaaaaaattctctgcctgacctatcgctatcgcaggcaagccagctcccacactcagtctctaatcggtgttcgtctgcgccgaacgcaggtatctaaaattcgaaattcactacacgcgtcacatcaggcaccttgccatacaacacaacaataagaaggtgatttccccatgctcaagctctcccgggcgctgctgtgcgccgccactttgtttgctgcgggcctggcccaggcggcggacccgatcgtgatcaagttcgcccacgtggtcgccgaaaacaccccgaaaggccagggcgcgctgctgttcaagaagcttgccgaagaacgcctgccgggccgggtcaaggtcgaggtgtacccgaactcctcgctgttcggcgatggcaaggagatggaagcactgctgctgggcgacgtgcagatgctcgcgccgtccctggccaaattcgagcaatacaccaagcaagtgcagatttatgacctgccgttcctgttcaacgacctggcggctgtcgaccgcttccaggccgctcagggcaaggccttgctgacctcgatgcaagacaagaacatcctcggcctggcttattggcacaacggcctcaagcaactctcctcgaacaaagccctgcatgaacccaaggacgcccgtggcctgaaattccgcgtgcaggcgtccagcgtgttggaggaacagttcaaggcgatccgcgccaacccgcgcaagatgagcttcgccgaggtgtaccagggcctgcagaccggcaccgtgaatggcaccgagaacacctggtcgaactatgaaagccagaaggtcaacgaggtgcagaagtacttcactgagtccaaccatggcctgatcgactacatggtgatcaccaacgccaagttctggaacggcctgccaccggatatccgcagcaccctggaccagatcatggtcgaggtcaccgtcgaggtgaacaaacaggctgaagcgctgaaccagtcggccaagcagaagatcattgacgccaagaccagcgaaatcatcgaactgacccccgagcagcgccagctgtggcgtgaagcgatgcgcccggtgtggcagaagttcgagggtgagatcggcgctgacctgatcaaggcggcggacgcctcaaaccagtgatcgtttgagcgacgctgatcaaatgtgggagctggcttgcctgcgatagcggtttgtctgatgcaccgctatcgcaggcaagccagctcccacagagatcttcttccacagtttgacccggtttccatcccgacatcattcccgcttcgcgaggttttgccatgcaaacgctaaggcgcgtctgggagcacctggaggaagggttcattgccttcctgctggccgccatgaccctggtgacattcgtctacgtcatgctcaacaacatctacacgctgttcttttccctggccgacaagtgggccttgagcagcaacttcttcaacgcgctgggcgaccacaccatgacctgggcccaggatatgacctggagcgtggcgctgaccaaggccatgttcggttggctgatcttttttggcatttcttacggcgtgcgcaccgccggccacctcggcgtggacgcgctggtcaagctgaccaggcgcccggtgcaacgcctgctcggcatgctcgcctgcctgtgttgcctggcctatgccgggctgttcatggtcgccagctacaagtgggtcagtgcggtgatgagtgcgcatatcggtgccgaagaccttgaccaatatggcgtcgacgtcggcgacatcgtgatcatcgtgccgatcggttttgccctggtgtttatccgctacctggaaatcttctaccgcatattcacccaccgtcaggtcgggttgggcctggccgacgaagccggtgaagccagcaagttggccggcggccatgaggagcgtcactgatggccgtgctctgtctgtttttactgctgtttgtgttcatgttccttggcgtgcccatcgcgatttcacttgggctgtcaggtgcggtgtcgatcctgatgttcagccaggactcggtgagttcgctggcgatcaagctgtttgaaacctctgacgcctacacattcctggcgattccgttcttcctgctctccggcgcgttcatgaccaccggcggcgtagcacagcggctgatcgacttcgccaacgcctgtgtcggccacatccgtggcggcctggcgattgcggcagtgctggcctgcatgttgtttgccgcgctgtccggttcatcgccggccacggtggcggcggtgggttcgattgcggtggcgggtatggtgcgctccggttacccgaaggagttcggtgcggggatcatctgcaacgccggtacgctgggcatcctgattccgccgtcgattgtgatggtggtgtactcggcggccaccgaaacttcggtcggcaagctgtttatggccggggtgattccggggctgctgttgggtttgatgctgatggtcgcgatctatatcgtcgcgcgcatcaagaagctgccggcccagccacgcgcgacgtttcgcgaatggctgacctgcgcccgccgtgcgttctggggtttgctgttgctggtgattatcctcggcggcatctacagcggcatgttcacgccgacggaagcggcggcggtggcggcggtgtattcggcgttcgtggccttgttcatctacaaggacatgaagctgcgcgactgccccaaggtgctgctcgagtccgggcgcctggcgatcatgctgatgtttatcatcgccaacgccatgctgtttgcccatgtgctgaccaccgaacagatcccccaggaaatcaccgcgtgggtgatctctgaagggctgacgccgattggctttttgatcatggtcaacatcgtgctgctggtggccggcagctttatggaaccgtctgccatcgtgctgatcctggcgccgattttcttcccgattgccatgaagctggggatcgacccgattcacctggggattgtgatggtggtcaacatggagattggcctggtgcatccgccggtggggttgaacctgtttgtgacctcggcggtgacgggcttgagcctggggcagacgatccgtgcggcgttgccgtggttgatgattttgttggtgttcctgatcatggtcacgtacttgccgtttatctcgctggcgttgccgcactggctcggtatgtaattaagccactgcgcaaaaacaatgtgggagccgggcttgcccgcgatgacggtgtgtcagccaatacacttggcactgatacaccgtcatcgcgggcaagcccgctcccacatttggttctgtgttgggctttagtggtccagtgcgctcaaaatcgcgtgggccaccttgacccgttccgcattcgggtaattcttgttcgccagaatcaccacgccaatatccctgctcggcacataagccacgtaagcaccgaacccgctggtagagccggttttgttgaacagtatgtcggcggtttcagcctttgccgggctcagccagttgaccttgtgcggttgcatggccatttcggtggagttgccatcgagcaatgcctgcaacttgatcgggtaggggtaggcctcccaccccaggccctgggtcatgccgttcacggtgtagtagccggtgtgggcggcggcgatggcttgttgcagcggtttttccagtgtgcccgggtgcatgttggcaatcacgtaacgggccaggtcctgggtgctggtcttgatgccgtaggcttcgctgtccagtgcgccggggctgacgcgtatgggtttctggtttttgtcatagccttgggcgtattgggctgacttgtcggccggtacgctgacgtgggtgttgttcaagcccagtttgggcagaagggttttctccatcgccacattgaacggctggcccaggctttgcgcggcgaggtagccgaacaggccgatgctcgggttggaatagaggcgctgcgcacccggagcgtatttgggtttccactgctggaagtaagcgagcatggactcggcgttgtcggccgcatcaggaaattgcaacggcaggccgccagcggagtaggtggccaattgcagcaggctgatatggtcaaacacgccgccggccagggcaggcaagtgctcgctggctttgtccgagagcttgagcttgccggtcgcctgggcataaccgccgagggtggcggtgaatgttttgctcaccgagccgatttcaaacagggtgtcctcgttcaccggttgtctggtgtctttggcggcgacgccgtaattaaagtattgcacctggccgttgttgaccacggccaccgacaggccggggataccttgttgttgcatcaacggttcgacgcggctgtccaccagcgtacgcaggtcggtggccgccatgcaggtgccagaacccagcaataaggcagatatcagaattttttgtagattatgcttcatggtggttcgcttccatgtaaaggatgaactgacgctaaggcctgcgcaggcgtggcaaatctaggtggcttttgtggcggcggcaaacgatgatatctcgcacctgccattagaaaaattaagggctttgtatgttgcgctcccacttgcccctcaatgccttgcgcgccttcgaggcgtctgcccgccatttgagctttacccgggcggcgatcgagctgtgcgtgacccaggcggcggtcagccatcaggttaaaagcctggaggcgcagctcaatgtcacgttgttcaaacgcctgccacgcgggctgatgctcaccagtgaaggcgaaaccttgctgccggtggtgcgcgagtcgtttgaccgcatcgcccagaccctcagccagttcgaaggggggcattaccgtgaagtgcttacggtcggcgcggtaggcacctttgccgtgggttggctgctgccacgcctgccggactttcaggcgcattacccctttatcgacctgcgcctgtccacccacaacaaccgggtggacgtggccgccgagggcctggattacgccattcgcttcggcgccggcgcctggcatggcaccgatgcctgccaattgctggaggctccgttgacggtgctgtgcgtgcccgccatcgccgagcaactgcaaacaccggccgacttgttgaaacacaccttgctgcgctcctatcgcgccgatgagtggacgcaatggtttcaagccgccgggttgcccgccgacaccctggtaccgcgcagcattgtgtttgattcgtcgctggccatgatggaggccgcgctgcaaggcatcggcgtggcattggccccggcgatgatgttctcgcgccagctggaaagtgatgtgattcgccaaccgttcgacgtcggcatcaccaccagcagctattggctgacgcgtttgcagtcgcgggtggaaaccaccgcgatggcagcgttcaagagctggttgaaagaagcgtcggtgaaggggtagattttttattgctgaaacaaaatgaaacattcgtgccgggctaacctctaccgtaccccgtactgagtgcctccatgaaaattccgcgccccgccgaccgcatgccccacctgattcaactgcgtaacctgaagatggcccgctccgcccacgcctacgtgcgcggcagcactgtgcaattctacgaatggctgcacagccaaccgggccgtcgcttgccccacggcccggcgatctggatctgcggcgactgccacgccggtaacctcgggccgaccggagacaataagggccgcatcgacatgcatattcgcgacctcgaccaaaccgtgatcggtaaccccgcccacgacctggtgcgtctggcgttgtcactggccaccgccgcgcgtggctcggacttgccgggggtgaccaccgcgcgcatgcttgaagaaatgatggtgggctatgaacaagccttcaaagacaagcccgacgaagcgccgccgcgcccctcccaggtcaaggccgggatgcgcagcgcggtggagcgcacctggaaaaacctggcgcgtgaacgcatcgaaaatgcccgcccgacgattcccctgggcaagcatttctggtcgctttcacgggcagagaagggcgcactccaaacgctgtgcgagtcagatgaaatccatcaactggtcacctcgctcaaaggccgccccaaggatgccaaggtcgaactgctggactcggcgtattgggtcaagggctgcagctccctgggcctgttgcgttacgccgcgttgctgggcgtcggcgacaaggatgaccaggaatactgcctgatcgacatcaaggaagccgtcggcgccgcggctccccgcgccgcacgggcaaagatgcctcgggacaatggccgccgagtcgtggagggcgcgcgtcagctgtcgccgggcctgggcgaacggatggtcgccacgcgctttctggatcacggctttttcatccgcgaattactgccccaggacatgaaactggagctggatgaactcagtgaaatcgatgccatgcacgccgccggttacctggcgcgtgtggtcggcattgcccatgcgcggcagatggatcgagccacacgcaaggaatggatggccacgctgcaggaaaaccgttcgaagcaactggatgcgccgtcctggttgtggaccagtgtggtgcagttggtggggagccatgaacagggctatctcaaccattgccggcggtatgcgctggagcactgaatggtttgcgaaacgtttgtgaatcgctgcgcgtgttgtgtttgaggcgctcgcgcagcaagtcatgtgaacgattaactttgttacttattatgtttttcgacctgtttcccagtgatttccagcgttttcctatttgcatttttatgccgttgtgggtgtcaagtagtggcatttgtccgcttgtcggaaataataagttggttgttcttgtgtgtttgttaaatggttttaaaaaacaattagttatattgttgtatgtaagattttactgatttgtcagaatgttggcatgttcaaagttcgatgataagttcccgccattatttatcgatggatcgaatatgtacgtgccaacttcatggactcggcaactgctgtgtctcactttgttgtgtttcagcgcccatgacagcgcccgcgcggcgggtaatcccggcgatcaggaactgatccgcgaccggcagaaccgtcttcttgaagagcagcaacggcgtcttgaagagctcaaggatctgcccggcaaagccgtaacacccgtggctcccgacgccgcggtcgatacccgttgtttccccatccggaccatcgaactccaaggcgccgatagcctgccggcaccggaccgcgagcgcttgctcaaaccctatatcgggcagtgcctgggggtatcccagctcaaccaactgctcaaagtgattaccgactactacatcgacaaaggcctggtgaccagccgtgcctacttgccacaacaggacctgtccaaaggtcaactgcaagtgcgggtagtggagggcaaacttgaagcgtttaaaggcgctgaaaacagccaactgtcgaaccgcgaattggccatggcgtttccaggcaacacaggcgagcggttgaacctgcgggaaatcgagcaggccatcgatcaactcaaccgcttgccgtccaacagggcgcaaatggaactggcacccggcagtgcggtgggtggcagttcggtgctggtcaagaacactgcgcaaaagccttggcgcgcgagcctctcgcgtaacaacgatggccagaaaagtaccggcgaacagcaatggggcaccggctttgaatgggacagcccgctgggcctggccgatcaactgatactgcgcggcggccacgacgctctcagcgaccaccagaaaacctcgaaaaacgcgatgctctactacaacctgccctgggggtggtggaacttcagctacagctacaacacgagcgattatcgctcagtggtacaaggcaacggttttgacttcaaggaaaccggtgacagtgaaaaccatcaagtgcgtgcggaacgggtgatccaccgagacgcgctcagcaagacctcggtcaacgtcggcctggctcatctgcgcaccaacaactacatcgaaaacagccgcctcaaagagagcagtaaccgcttgagcgaactgcaactgggcatcaatcacggccggcggatcggtagcgcgttcgtcaacctcgacgccggcatgcaaaacggcacgggtgcgttcgacgcccagggcaatcacaacccgcgcccaggcgtaccggatgcgcgttatcgcaaatacaccgccaccgtcagctacctgcaacccttcacgctgtggggcgaggccttgagctttaccagcctggccaccgggcagcgcagtgaagacgtgctgttcagcccccagcgcatgagcctgggcggcgcctcgtcgatacgcggctacaaggaccaacaactgagcggcgacagcggcgcttactggcgcaacgacctgcgctggagtcgcccggtgccccttgactggctgcgcccggcattcgccgagtacggcgccggcgtcggttacgacagcggcgtcattcgcaacgcccgctacaacggcgaggtacacggccgggtgtcgagcaactcgctcgaggtgttcgcccggggccaatacctcagcaccagcgtgacctttgcccactcgctggaacgcccggcggcgctgcttgaacgcgaagcgccgatctatttccgcctggacttcttcctgtaattcaacgcattcgttgcatcgagaaacgcatatggacattcgccacttcgccttcctgggcacacaaccttctgcccgtctgcaaccgcgtgagcacttctggggtttgcccaaacgtgggctggcgttgattctggcgaatgccctgttctggcaaccgttgctggccaatgccgagggcattgtggtcagcgccccgggcaccagcctgggcgcggcgggtaatggcgtgcccatcgtcaacatcgccgcgcccaatggcagcggcctgtcccataaccagttcaaggactacaacgtcggtgccaatggcgtgatcctcaacaacgccaccgagcgcactcagtccacccagctcggcgggatcatcctcggcaacccgaacctgcaagggcgcgcggccaacatcatcctcaacgaagtcaacggcggcagccccagccaactgcgtggctacaccgaagtggcgggccagtcggcgaaagtcatcgttgccaacccctatggcatcagttgcaacggctgcggcttcatcaacacccccaacgtcaccctgaccaccggtaaacccatcctcgataacggccgcctggaccgttaccaggtcgatggcggtgccgtgaccatcgacggccagggcctgaatgccagcaacgtcgaccgctttgaaatcatcacgcgctcggcgaagatcaacgcgcagatcaatgcgcgcaacctcacggtcattgccgggcgcaatgacgtcaacgcgcagaccttgaacgcgactgcgcgtgccgaggacggcagcgccaagccggagctggcgattgactccagcgccttgggcgggatgtacgccggtgcgatcaaactggtgggcaccgaggcaggcgttggggtgcggctggacggtacgctggcggccagtggcggggatattcagctcgacgccaatggacacctgagcatggcgcaggcggcagcgagtggcgcggtcaacgtcaaggccgcaagcctcgatgcccagggtgcggtctacgccggcactgcgctgggtctgcagacccaaggcgacttgaacagccgaaaaaacctggccgcccgcgacagcatcatgctgtccagcggtggtcaactgaccaacaacggcattatcgaagccggcgtcaacgcggataacactcgcaataccacgggcgatgtaagccttagtgcgcagaccctcaacaacaccgacaacagtgtgatcaccagccgtgccctgacggtcaacacccatgccttgaacaaccagggcggcaccctcagcgcaaaacagggtgcgaagatcaccgtcgtcaccctcgacaaccagaacaaaggccgcgtgctcagcaacgccagcctggacgtgaaagccgatcgcgtgctgaacggccaaggtgggctaatcaccagcggtggcccgctgacctccacccttggcgagttgagtaaccgcggtggcgaagtgtccagcctcgacgtcgcggccctgaatgtcgctaccctggacaacgtcgccgggctggttacggcgggcaacaccctgagcctcaccgccagcggcgccgtcaataaccagggcggtaccctcagcagccagggcacgctcgcgctcaaggcgggcgccgtcgataacagcgcggtcggccgcatcgccagtaaccaggcattgacggccaacgtcgccagtctcaacaacaacggtggccggctcaccagcgtcaacggtctgaacctggaccttaatcatggccaactgaacaaccaaggcggcctgatccgtggtccgggcctggtgttcaacaacctcgccgatgtgtcgaaccagggcggcgaaatttccagtatccagggcttcaccctggcggcgcaaagcctcgataacagtggcggcaacctgatcagtgatcaaggtttgaccctgcggctcgcacaggccttgagcaacatcaaaggactggtgtctgccagcagtctcgacgctcatgtcgcgagcctggacaacagcaatggcatgctcagcagcaagagcgcgttggatttgaccgtcgatggcgcactgacaaaccagagcggcgtagtggtcgccgatggcaacgccaacctgatcgccacgagcctggataacagcaacggccaggtttccggcaagcaaaacgtcaacgctcgtatcgctgatgtggccaaccacaatggcctgatgatcgctcaaggtgtcatgagcctggctggcaatgctctggacaaccgccagaacggcctggtgtccgctactcaaggtgtgcagctcacggttgcccgtgtcgacaaccgtggcggtgaagtgtcgagcatggccgctgtcaccctcaacggcgcgcacctggacaatagcgacagcggccgagtgattgcgggcagtgcgctgaacctgaccgtcgatgagattctcaaccgcaacctgggcgtgttgcgcgggcaaaccggcgtgagcctgagcgccgcacaactggacaacaccggtggcaccgtcgccagtcaaaaagacagcgcattggccctcaggggtgacctgcaaaatgctcaaggcctgatcagcagcgaaggcctgctgacggtcacagcggcagctttggccaaccgcctgggcagcctgtccagcgccggccaactgagtgtcaccaccacgggcgccgtggataaccagggtggccgtttggtcaccgacagtggcctggacctgcgcagctccagcctcgataacagtcagaaaggcaccttgagcgcgcgccaggcggcacacatcaataccggcaccctggacaatcatcacggtggcggtatcagttccgctgaaacgctgggcatcaccgccggccagctcaacaacggcgacggcgggcaaatcagcagcgccaaggctctcaccgccagtgtcagtggcctgggccagcaaggcggtcagttgaccagcggcgaatccctgaccctggacctgaaccgtggccagttgaataaccagggcggcttgatcaacgccccaatgttgttgctcaagaacctcaaggacgtcaacaaccagagcggtgaaatctccagccgccaggccttcaccctcactgctgataatgtcgataacggcagcggcaaactgctgagcaacgatgcgctgaccgtgcgtatcagccaggcgctgtccaacgtcaaaggcctgatcgctgcggcgtcggtggacgcccacgcggcgacgctcgataacagcggcgggacgctcaccagccgtggggatgcactgctcaacgttgatgggcaactgaccaaccaaaaccagggcctgatcaacgcagcccacaccctgactatcaacagcgccgcgttggacaatcagaacggttcgttgctgggcagcgccattgcgctggatttcggcagcgccacaggcgacctgaacaacgccggtggcctgatcaccacagcaggtatcctgagcctggaccacctgcgtgatgtgaataaccagggaggcgagatctccagtgcgcagagcctgaacctcagcggccgcaccctggataacagcgccggcaagctgatcagcaacaacctgctggtactcaaggccagcaacctgatcaaccagggcggtttgatgtctggctggcagggcttgaccgtcagtggcgagagcctggacaaccgtaacaacggcacgctctccagccgttacggcgacctcaacgcgacgctcaccaaccgcctgctcaacagcggcgccggtgcactggtcagccagaaagcactgatggtcaccaccgccgagttggacaacagcgacaagggcattctctccagtgcgagtgaccagaccctcaccgtcagtggcttgctaaacaacgcccagggcggtgtgatcgacagcggcgcagccctgaacctgacggcacagaatctcgacaatagcggcggcagcatcactggcggtacggcggccaccctcggcctgctcgcgaccctgaccaacaccaacggtaaactgtccagcggtggcccgctgctgatttcccgtgccgcgcagatcaacaaccagggcggccaaatcgccagtcaaggtttgttgaccttgttgacgggcggcctcgataaccgcaatcgcggcaccgtcgcggccaatgagcgcctgacccttactgccagtggtgaagtgcaaaacggtagcgacgggttgatctacagccaaaacgctgacctgaagctcaccgccaaccgcctggacaacgccaagggcgcggtacaaagcaaggcgggcctgacactggacgtcgcaggcgatatcgataaccagagcggcaagctgattgctcaaacgggcgacctcagcgcgcaagccgccaatctcgataaccgtggcggcgtactttccagcctcgcaggcgcgctgcaaagtcgcgttgtcggtgtgctgcgcaatggttatgacctgaacaacaaccgccagggcggcattgtccaggggcaatctctgaacctgctggccgggactctggataactatggcggacggctctctgcgcaaagtggcaatgccttggtcagcaccggtaacttcgacaaccgcgacggtgggctctatgccaaggggctggtgagcgtcaccggccatgatttcgacaacagcggtgacaacgatggccagattgccggccagcagatcgacctcaacctgagcggtgcactgaataaccgcaagggcatcatcgaaagtgaatccaccctcaaggtcagcgccgccagcctagataaccagaccggtcggctgcgggcgctgggcgccaacggcagcaccgagttcaccctcggcggcctgtttgataaccgcaatggcctgttggaaaccgccaacaacaccctgaccctcgctgcgggcagcctgcagaacgcaggcggcacggtgttgcacgtgggcaccggccgcttcgacatcgctccgggcaacctcaacagtgtcggtggcagcctggtgacgcggggcgacctgaccgtcaatcaggctgcctggaccaacagcagcgtgatccaggccgggcgcctgaccgtcaacgtcaaccaactcgaccagaccagcggcggtcaactgttggctgcccagcgttttatcggcagtggcggcaactggtccacccatggcctgattgccagcgatggcagcctcgacttgaccctgagcggcgccctgaacggcaccgggcgcatcagcagcctgggcaacctgaccctcagcgccgcgcaactgaacctgagcaataccgccagcatcgccggcggcggcattaccaccgccaacatcactggcaccctgaacaactacggacgcctgacgtccaccaccgacctgaacttgaccgctggcgctatcaacaactacgcgaccctgggcagtggccagaacctcaccgccaccaccggtgcgttgctcaatgaccacgggctgatcttcagcggtggtgacatgagcctgcgggtggatacgctgaacaacagctacgccgatatctacagcatgggcgacctgagcatcgaccgtgacggcaagggcggcttggctagcagcatcaccaaccgctcctccagcatccagagtgacggcaacctgagcctggccgcctcgacgatcaagaacctgcgctcggtgctgaccaccaatgacggcggtatctacacggcttcgatcactgagtttccctgccaggaaggccctaactatgccggcgattgcagcggcggcaaggaaaaccacctgtggcaaatcgttcaacgcgacaagttcgaagtcactgacgccagcgccgcatcgagcatcagcgccggtaaggacttgaccattaccggtggtgacctgctcaacgcgagcagcagcatcggcacagccggcaacctgaatatctcggtcaacaacctggccaacaacgggattgaaaccggcgagaccgaaacctggcgcctgtttatctccgagcgtacccgcaatgccagcggctggtattcagctgcggctgcctttaataatcgctattccagcaccggcgcagcctataaccccaaggacctgagcggtcttgaagcggccatggcctcgttcatcggcatgaccgagcaagaacgcaccgtgctgcgtcgagtcacgaaaatcgactccggcgatcaacgttatgctgccgtgatccaggccgccggtgcggccaccgtcaaggcccagggcaacatcgacaacagcgttgtgcggcccggtttcaactacgtgggcgcaggcgccaagaccaccaccgacgcttcgggtgccagcgcggccaacggtttctcgacccgtgtcaccatcaaccaacagcttccaccagacctcgcccaacagcagatcaacccattgagcctgcccggtttcagcttgcccaccggccagggcggcttgttccgcctgagcggcgagggcactgccacccctaccaataccggcccacaaagctggacgttggggggtaacaacctggccacggtggatcgcccgcaagcgacgccaggcaccccgcaacgcacggtggccggtcaaggctcggccaacccgctcggcccgggccaagcgactgtcacggacagtggcacgtcagtcaacggcttgaccgtcaaccgcgtgcaaggcctgcccgacagccagttcgcctccaacccgcaaaaatacctgatcgaaaccaacccgctgctcaccaatctgcagcaattcatgggctccgattacctgttgtcgaaactgggctacgacccggaccagtcccaaaagcgcctgggtgacgggctctatgaacaacgcctgattcaacaggccgtgatcgcccgtactggccaacgcttcatcgacggccagaccagcgacgcctcgatgttcaagtacctgatggataacgccatcggtaccaaacagcgcctgaacctggccgtaggcgtcagcctcaccgccgaacaagtcgcggccctgacccatgacatcgtctggatggaaaacgccaccgtcgccggccaacaagtgctggtgccggtgctctacctggcccaggccaacaaccgcctggcgcccaacggcgcgttgattgccggccgtgacctgaacctgatagccggggccaacctcgacaatgtcggcaccctgcgcgccacccaaaacctggccgccagcgccggacgcgacatggtcaacagcggcctgatcgaagccggcaaccgcctcgaccttctagccacccacaacctgaccaaccgcgccggcggcatcatcgccggccgcgacgtcagtgtctcggcggccaatggcgatgtgctcaacgagcgcagtgtcacccgccaccagagcagcagcggctaccgcaccgaacgcaccgatgtcgtcgacaacgcagcgcgtatcgaagccgccaacaatctgagcctgggtgccgggcgcgacgtcaacagtgtgggcggggtgctgaaaagcggcgccgacaccgtcatccaggccgggcgcgacgttaatcttgtctccgctgaacaacgcaacgccaacgcggtgactgacatgtctcgcggcagcagtgccactcaatacggcaccgtcatcgaagccggccgcgacttccaggtcgtcgccgcacgggacatcagcgccatcggcagccagatcgatgccaagcgtgacttggccatggcggccacgggcaatttgaccttggcctcggcggagaatgaacagcattcggcgttcaattcgaagaaggttaagagtcaggaggatcatgttcagcaagtgtccaccacgctcaaggcgggcggggatgtggcgttgagtgcggggcaggatctggcgttggtggccagtacggttaatgcgggggatgaggcgtatttggtggcgggtaaaaacctcgccctcaaggcggcagaggaccaagactacagcttctacagcaaaaccaagaagacatcctcgggcaagaaatttcgccttgatgaaacggactccgccagtaacgtcggcagtctggttagctcgagtggtcacagcacgttggtcgccggagaaaacctgctgctggcggggagtgccgtgacggccgagaaaggcgcggcgaaattggtcgcgggcaacgacgtgcagattcttgcggtgaccgattccgatagtgctcgccatgagcgcaatgaaagcaaaagcagttggggcggcttcaagtcgagcaaggtcgaggaccaggtcgacgagaatcgtaccactgcggtcggcagcatggtttctggcgataccgtgatcatcgcgggcaggcaagacgtgaaagtgacgggatcgtctctggtcagcaccggtgatctggctgtgcaggcggggcgcgacctgagcatcgatgcggcgcagaacaccttctcgcgcaccgatatgcacaaggaaaagaaccgtgacctgaccggcgtgttgaccggcaacaagttgggcctggatgacattaccggcaaccaacacctgttcatcaacagtcagaaacacaacggcaccgcggcagaaaccacgcttaccggcagcaccgtcggttccagcgccggcaacgtaacgctgacggctggacgcgagctaagtgtggtggccagcgatttggtcagcaccaagaacatgtctctgaatggcgctaatgtcacccttgctgcggggaccgaaacggcgaatcaaaccagccaggacagcgccaagagccttgcagtggggcgcgtgatcggcggcacgatcgtcgataccgccaagagcatccgcaatgatatacgggccgcgcaacaggccgatgacagccgtttgaaagccgtcaaaggcgcgcaggcgctgctgtcggcctacagcgcactgaacggcgatgacagcgcggccaatgagtcggatggcaagcctgccaatagccagggttcgatgatcaagatcggcaccgagctggcgtctacacgcaagaaaagcaccagcgaatacgacgccgaaacggtcaagccatcgacgctcaacagcggtggcagcctggcaatcgtcgccacggggagcgcgccggatacccaaggcgacatccatgtgatcggcagcagcatcaaggccaaggacaccctgctgctggcgaaaaacaatatcacgctggaaagcgcacaagatcgcaaaaactgggacaaccagaacagcaacaacaaaaccagtatcggtgccagcttcaacattggtgaccagaacggcttcacccttgacctcggtgccaaaatggccaaaggcatgggcactgggcaggaggtcacgcaggtcaatagcaccgttgacacaggtcaactgatactgaaaagcggacaagacgccacgctggccggagcccaggtgcatgccgatgcgatcaaagctgacattggcggcaacctgaatatcgcgtctcgccaggatgaggcgagtcagaagaacaagcaaaccagcgctggtgttggcgccagtatctgcgtgccgccgttctgctggggttcgatggtgacggcctccggcaatatcgctggcagcaaaatgaacagcgactacaaagccgtcaatgagcagaccgggttgtttgcaggtaacggtggctacgacatcactgtgggtaaaaacaccacgcttgaaggcgccgtgattgccagcgaagccagcgccgataaaaaccgtcttagcaccgaacgcttgttggtcagcgatatcaagaacaagagcgatatcaaaagccaggcggccagcctgagtctttcctataccagtaccaaatgggataaaccgggcggtccgataacaccggacgatcaaaggcagtgggcatatacggacgccggcggcacgatgccgttgatgctcaaggaatctgacagcagtaaaacccgcagcgctgtcagccctggaaccatcatcgtgcgtgatgtcgctggtgcatatgatgtggtggggctcaatcgcgacaccgcaaatgccaaccagcatctggaccggcctgatgaaagggccatgcaggagcgtattgatctaattcagagttcggcgcagttggcgagtacggtgattgaaaccgttgccaaggccaagtcggacgcggctaaacagcaagcgagcacagctaaaacgcctgaacagatcgccgcagccaatgtggctttagcggatgcggccagttggggtgtgggtggcaacaagcgaatcatggcggatatcgcaacaggtttgatcgcggctggtttgggcggaacaggcaccagcaccaccatcggtatcgttgcgaacactacagctaatgatacgttcagcaagattggcgactacgcaagccaaagggaagcggcggcaactgaccctacggagaaggcggcatgggccgaaggtggcgctgcacgtgtgctgctgcacaccctggcaggcgccgcgatgggactgtcgagcggtagcgtacagagtgcagcgttaggggcgggggcttcagctgccttgatgccaatcgttgctgatgcgttaaaaaacagcatcgatgaaccgcacaatcgggatgctatttccgccttgattgctgcggggggcgggaccgctataggttctgcctcaggaacgaccggttcggttgttggtggggcaagtgctgcgaaagttgacatgttcaaccggcagttgcacccggctgaggtgatgctgctgaagaaacaaactgccgccttggccaaagaggccaatatcaccacggcagaggctgaagcgcgcttggctaacggcctggcctactatgttgatgctgactggcgtgcggtgattgacgctcaccagaaccagccggatgcaacgacgctcaagtacttgggcatagccttggctccgcttggggaccgctatggcctgaacctctcggtaggtgatgttccactgctgaccgacgcggggaaggtctatacccctgtagagacggagcgcttacttcaagactttcgcataaaccatccagtggagtacgctaactcgcaggttaatggtgaatacctgcttgggaaatttgaccctgtcgctgcgcagcaaagggccttttacgacaagaaccttttttatggcgcatcgttaggggaggttttgaaagggggcgcgagcggtattgctctcggtacgggtgatgcgttacacgataccgccgtcggtatttgggcacttggcaccgggttggccaccgactttcctggtacgagctcgcaggtcgccaatggactgctgggcatgctcgcggggcgttggcaagaaaccggggatgctgaaagagatgtccagagctatctttatttgctccaaggcaacgaggctgggcgagccaggatagaggctaagaaagcgaccgagcttgcgttgagcctcataccggcggggaaaattggggcggcagggaaggctgcggagattgcaggtggtgcaaaaggaacaaccgttgttgctgctgatggtgcagccggcgctgccactaccgccaaaactattccatatgagccaaaggggtcggttgttttacaaggcgatgcccctgtatgtggtccggcttgcgctgcaatgacaattactgataaaactggtaagtctgttagtcttgatagtgtagttggaagctttgtaaatggtgtcaggcccacgggtgttaataccctggagttatcagatgtgatatccaaggcgggagttaaaaatactgtcaatacggcaatgcagcctgagcaattaaataaggctctgagggacggtgcgagtgttatcgtgcaggtgcctgctggccaaggaaaacatttcattattgttgatagtgtaaaaactgttgagggcgtgaattactatatgactcgcgacccatatgttggacctagaggcgtacagcaaggattgttagatggtgcgatgtcaacaggtgttaatgccattgtgattgggaaatgataatggatatcggtgatattgttgagttggacgggtggttggtaatcattgactataggctttttctcatcccggaaaactattcggaaaattatgaggatggcgaaaaatatgaactatccagtccggagataattttttctgtgatggatgtggttcttccattgggtggggggaagagctttatattccataaggcaaaagtctcgggagttgtgatgggtgttttgccagtaaagattaagccagtggttctatctgtggcggagaggggtcgcggttttgtttctgtggatgttgcagatagcaatcttgaaaggtataggtctcgttatgaagagtttcttaagaaggggtacaacattcagtctgctgattggttggactatttgtaacgaagaactaataatggagtgcggagtgaaaaaaagggggcgaacttgaatggcacttacttaacatgtttaacgtgcctatttcccctgacatccgcccttgctgaccgacgtgacttggtcagtaagggataggcctgaggttttgactaaaaaaggggacagatttattttgtctttgggtaatggcgtcaaaaaacgcgataaatggagtcgagcgagtgggggcaaagaagtaaacctgtccctttaattcacttgaaccccgaagcctagagcgctgtaattgtcgtcccttggaccgttcgatggcttacacaggggcttttttgtcgtcctggatttgttgtgatgggctgaaagctcgcgtagagatactcagagacatttggatgttgctctttaataactgatttttattttttgtatttggaaaaaaattggaaaaaatgggggcggatttatttgattttcaatcggtctttttagataaaaataaaaccgtcccctttttttagacagctcgatcgatagagaagaagtcaaatcaagccggcagagttctggtacaggcagatttgccaagtactgatatatcttccatcgcggcccgtatgtggggaaaaactaacgtacagagtataaagactatcttctttcagaaacctgacggatcattggttaggtttgatcgaccagccgtgggaggttagttatgccgaagtattcgtgcacctgtggttacgttatgaacctttctcaagggtggtccgactacgagttgactcttattcctgagtcaacaatagagacgctgggggataggctagacagtgaggataggttttcttctgatcagatatatgaagctctcgatgagaaggccattacggtatataggtgcccaaagtgtagaaggctgcatttggaagaggagccgaataaatttactacttatgtagtggaataaattttgtcaaacgaaaagccccagtctacgagttgggggggtattgcctgcgatttactaccacccccgtctctgctcgtgatcggctaggtacaacgacagttcatcggagaccagcaacaacagcgcgcggctgatctggaagaaaaaggggacaagaaaaaggggacagatttattttttatccatctgctaggctctgattttctaaggaaggagattgcctatgcccagattggggcgcgtcgttttgccgaactatccgcatcacgttgtacagcgtgggcacaaccgccaggtagtgtttgctgttaagactaccagcggtacgtgaacgaccttagagagctcaaggacgcatttggaataaaagtatatgcgtactgcttgatgacaaatcatgtccatttgttagtcgcaccaagcgattcagtggctggacttgggcagctaatgaaagcccttgccgcaagggctactcgttatcgaaacagattagaggggcgtacaggtacgttatgggagagtcgatataaatcgagtgtggtgcaaacggagagttatctgctggcgtgctgtcgctacattgaactgaaccgagtacgtgcctgcatggtggctgatccagcggattatttatggtcaagttataacgcccgcgtggggctttcgcgagattgcgattggctcgatatagatgcgtgctttgctgtgttgggggatacacgtttggagcggtacgaaagttataaatcatttgtgaggcagtccgtttctggtaaagagatgaaaactattcgtgaggcattgcagcgtgggcagcttaccggtaccgctcgttttgtggacgaagtcgaaaaaattgcaggaatacgtattgagcatcgagggcggggtcggcctagattgggtgcagaaaagtaaaatttaaataaatctgtcccctttttctattgacgaggttctcaagaatccgaattcaacattctcaaatttgagtcgcggtgggttagaggttcgggcgcctgatggaagaggtctgcgctacaatagtgacggttcattctcgggatttttggaccctaaggcgaaaccatgaaacttgaaagtaatctagattttgaaattctggggtttagtgatagccgctatgaaaatctgacggtcgaaattcaatataaaggcgaacctattgctcagattaatcaggacaagggagtagatcgcttagaagtagaaatttttgctgatttaaatggcgcgattttgaaagttccattttctggtctcttggaggtaatgattcttgcgaaaagtttcattgtcgagtagaaagtgaaaaaaaggggcggaaagggggtgatttagtttgttccagaaaaagggggtgtatttatattgttttcagtcggtctttttagataaaaataaatctgtcccctttattttttgtcccctttattttccaaaagatttcaagcgtaaacctcgaaaggatagattgttttttgtcaatgatgcgttgttcactaaatgaatctctcgtggttagctgatcttaaataaaggactatacctatgatattacaagctctatttctgcttgttggtttaccagcaaccgcctccgctaccgaagccgcaacgctgcccggcgaagcagagtatcaacagggcgttgcgattctgcgtgaaacagaccctcaggtcgttgagttgttaagagcctttcatgcaaacagtaacgcccaaggttcagacgctctaatggacgcgttgcgaaaaaagaacatgcgggccgtccagctactcagtgagtcctctacactcggccatcctgtggcccaatatcggcttgcactctactatcaagcgtacctggttccggaggacgaaaaagtgtgtgagttatataagtcgagtttagcgcaagggtttgcacccgctgcgctcagggtcggaaacgcttgtaagatttacacccttggaccagagtacaggcctttgctggaaaatgccttgcaccgaatgtcgcagttttcgaagtactacccgcagccgacagtgtccctggagtgtgccgagtcaacgccaaaagacgtagagctgcaatggggtactcagaatgattatctggctgaactctataaactcacggccagtcagtttgatcgggcaacagcaatgccaaagcgtattgactatttgcaaaaagctgtggtgactaatggttgcccctctgcgcaaaaaatgcttgatatctaccagtccccaaaataaattttccatttacgcagctataaatatcaaagatcgcttggcatgtcgttagcctggcttacaaggagttgtgcggtgatagcagaacaaaaaaagaaagtgttttggtattcggtatggggggcggttgctgtagcagtggttgcgattttaaccctacaagcgatgcaagatccgccgccgaccagcaagcccagcttcctgagtgacctgatcattattactgcgcgtacgctccccaaccatcggttggttgatgaaaatacgacgttcattcgagcgcaagcggctaacagccacacgctgatgctctattacaatgtgccgggttacgacgcaggtcccaatgattttaacgtggcggaggttaagtcagtcgttgcgaaatcggtttgcgactcggaaatgaaaaaagagcagtcgatcctttccttgggtgggacttatgtttacgtctatagcagtaaacatgtgaaagagattggcaggttcgaagttaacaagcagagctgtgagggcgttatgtaattgccttatgattgcatgcgcttgatcgtgcgggcttttatggggatggccagaacggcggcgggcttgcttacgaaggcggtgtgccagtgatggaaaagttggctgatgcaccgccttcgcgggcaagcccgctcccacattttggggtgtagggtgtcagggatattggctatgccttgggggcaggcaagccggcccccacagtgggataaccgtcaggccaggtatttgcgaaaccagcccagcgtgcgttcccaggccaggttcgccgccgcttcgtcatagcgtggcgtcgaatcgttatgaaacccgtggttggcgcccttgtagatatacgcctcgtacgtggtacccgccgccttcaacgccttctcgtacggcggccagccttcgttgatccgtgtatccagctcgccgtaatgcagcatgatcggtgccttgatgcgcggcacgtccttggcgttcggttgccggccataaaacgacaccgccgcaccgagttcggggtaggccaccgccgccgcattggtcacgccgccgccgtagcagaagccggtgatgccgactttgccggtgctgctgtcgtggtgcatcagccattcgatggcggcgaagaagtcgttcatgagtttttcggggtcgactttttgttgcagttccacgcctttttcatcgttgccggggtagccgcccacggaggtcaagccgtcgggtgccagggcgataaagccggctttggccaggcgccgggcgacgtcttcgatgtaggggttcaggccacggttttcatgcaccaccaccacagcgggcaatttgccggcggctttggccgggcgcacgaggtaggcgcgtacggtgccgttgcctttgggcgaagggtaggtgatgtagtcggcgacgatgtccgggtcggtgaatttgacctgttcggccagtgcgtaattggggctcagggccgcgagcagcgccgaggcggtgaggccgccaaaggtgaacagcgcggcacggtcgagaaattcgcggcggttgatcttgccgtgggcgtagccgtcgtagagttccagcagttcgggggcaaagtctttcgcggtgagacgagtcatcggtgcaatcctcgattagcggtggccgtcaatgtagaccaggttcagccctcgcggccatgggcggcgtccgacaattgccgggtgtcgacgcgcacgaacaccgagtcgccaatggccgtcagcacatccccggcgtacacctcgcagaccacgcggcttttgcggccgacgtcgccttcgatgcgggcgcgcagcgtcagtgtgatgcccatgggggtcggtttgatgaatttgatgctcaggttgccggtgacgcagtcgatacgcggcaggctgccgggctcacgcctctcggcgcggtagtggtaagccatcgcggtccagttggaatggcagtccaccagcatggcgatcaggccaccgtaaacgaggtcgggccagccgctgtaccgggcttcgggcaggtgctcggcgatcaggtggatgccgtcggcatcccagcggcttttgatgtgcaggccgtgggggttgttcgcgccgcagccgtagcagatgccttccggcgcagtgatgtcctgtagggcgggggtgtgcatgcagcgtccttatgagtgtggggcgactactctgtttagcaggccacggggcggatgggaataaatccgtgagatggggtgttagctcagtacctgtttcctgccctatatggagcgttgcatgaagcctctcgtttacctggccatccttctcggtttttgcaccagcgcccaggcggtggagtacaaggacgtcaaccgcacggccagccaaatcagctttacctacaaacaattgggccagcgcgtgtacggcaccttcagcgattttgaaggcacgctgacgtttgacacgcaaaagcccgaggccgggcatgcgttgctcaagatccagttggcgagcatcgatgcgggcagccccgatgccaatgacgagctgcaacgcgcttcctggtttgataccgcgacttacccggtgggcgtgtatgagtccaccggcgtcaccccgctgggcgacaaccgctacaaaatcagcggcaacctgaccatcaagggcaccacacggccggtggatgtggacgtagtactcaaggagcaaagcggcatcggcgtgtttgacggcgagctggtcctcaagcgtgacgacttcaagatcggcgaaggcgaatgggcgggtaacagcgtggtatcgaacgacatcaacatcaaattcaagatggtcgcgccacagcgctaacgcgcaaattttttcgccccggccacacagccgatcactgccaccgtcaccaggaccatgcccgtgctgacctgctcatgcagcaggcctgccgccaacgccaggccgaagaagggttgcagcagctgcaactggccgacggcggcgatcccgccctgggccaggccgcggtaccagaacacaaagccgatcagcatgctgaacagcgacacgtaagccaggctcagccaggcgggcaggctgatgccggtgaagcttgatggcgccaggatcaggctcaaaggcaacaccaccggcagcgacaccaccagcgcccagcagatcacttgccagccgcccaggctgcgcgacagcttggcgccctcggcatagcccaggccgcaggccagaatcgccagcagcatcagcatatccccggtcggcgcggcgctcaggccctgggcgaaggcgtaacccatcaccagcccactgcccaggatcgagaacagccagaacaccgggcgcggtcgttcgccgccacgcagtacaccaaacaacgcggtagccagcggcagcaggccgacaaacacgatggagtgcgccgaagttacgtattgcagtgcgagggcggtgagcagcggaaagccgatgaccacaccgagtgcgacgatcaccagcgatgtccattgatggcgcgcagggcgttgttccctgaacaaccacagcaggccaagcccgagcatcgccgcgagggtggcgcgaatcatcgtgagaaacaccgggtcgaacgccatcaccgccaagcgtgtggcgggcaatgagccgctgaatatcactacgccgataaagccgttgatccaaccctgagtgctgctgtcgagcgtgccgagccgcgaggtgcgttccatgggaataggcctgaaaaagagaagttgcgtgcccggcatcctagggttgaagattaggacaatcaaagaattgtcatggatacatccctcatgccacgcgcccgctacaaaacgctggtcgacgccttcgccgaagacatccgctcgggggcaatgccgcccggtacacgcttgcccacccaccgccaattggcggccgaccatggcctggcgctggtcaccgcgagccgggtgtacaccgagcttgaggccatgggcctggtcagtggcgagaccggccggggcacgtttgtgcgcgagatcgcgctgccgccggggcagggcagcgggcagatgacgcttgccacaggcatgctcgaccttaacttcaactacccgtcgctgcccggccaggcggatctgttgcgcacggccctgcgccaactggcgttgtcgggcgatcttgacgccttgctgcgttaccagccccatgccggtcgcttgcatgagcgtgcggtggtggcgcggcatctgttgagccgcgggctggcggtggcggcggaacaggttttagtggtcagcggcacgcaacacggtttggcggtgaccctgatggcgttgctcaagcccggtgacgtgattgccgtcgacgcgttgacgtattcaggcttcaaggtgctggctgaaaccttgcaccttgaacttgtcgcgatccccgtaacgcccggcggccccgacctggagttcctgcgtagcctgtgtcgcaaacgtccggtgcgcgcggtgtacagcattccgactttgcacaacccgctgggctgggtgatggacctggcgcaacgtgaggcgttggtggccatcgcccgccagcaccatctgatgatcctcgaagacgcggcctacgccttcctcgccgacgacgcgccagcgccgctcgccaccctggcgccggaatgcacggtgtatgtcggcgggctgtccaaaagcgtggcaacgggcttgcgtgtggggtttatcgcggcgccggcggcgtgggtcaaagtgctggaacgcaccatcatggcgaccacctggaacgtgccgggggtgatgagtgcgattgcagtggcgtggatcgaagatggcaccgtcgccaggctggaagcgcaaaagcgcgaggacgcgcgggcccggcaagcgttggcggcgcaggtgttgaagggcgtgagttacatcagccacccgtcatcctactttctgtggctgcccctggcggaggatgcccgggccgatcaggtggcaatgacgttacagcgcgagcatatttcggtgtccaccgccgagccctttgcggtctcggcgtttgtgccccatgcgttacgcctggcgctcggctcggtggacatgccggccttgcgcgaggcgctgttgaaagtccgccgggtggtggcgtggtgagccggggctgatcagtatttgtaagcctgacggccgatcagcagccatttgcctttttgtttctgccacacctggaagttgtcgatgtcagtcggcgtgtcgacgccgctgttcacggccagcgcgtgaaagtggttgcgcaccagcgcggtgtcgccgtccagggtgatggtctggttttgcatttcaagggtcttgaaagcgctggtgtgggattcaaggtcggcgatgaattggtctttgttctgcaccttgccgctggagtggccgtaggtgagcttgtcggacgtcaacgcgtgcagctgcttgaggtccaggtgcagcattgcttgggtcagttggtcgaccgcttgggccacatccttctcggccggggcaggtgcagctgcgacgtagccggtgaacaggcacagaaaaccgatcagcactttgacgttttgcatgggtgtttccttattcttgttgggggtggtgacgactgctttagtcgtcgtacaaccatgcaatagttcaggtgcggaaggaaagtgaaatttcgaaatatcttgaaaagattagcgggtgaggcgttctaagcacctgttgatcttgtacgacgtctcaacacattaaaatgttcgtgctgttgctgtcggccacttcctgcgtgaatggcgcatcgctatgctagcgcccaaataacaaactgccccgagggccaaaatggattttgactggcacagcgacgccatcactcgcgccacccccgtgacgtcccactataaaaatacccagaacgtgcgccgtttcatgcgtgagcactgcggtcccgggttcgcgttcgaccggcctttcatggcctggattcgcaacgacgtgcccaagacgctgggcgatgtcgtggatgaatggcagcgtcggcagcaggagccaaaaccatgacccgcgacgaaaaataccaggccgcgcaacagcgcatcggctaccaacaggacgaattcaaggtgggcggtaactacacgccgctggtccgcgatggcaaccacctgtacatcagcggccagattccccgtgtgggcgatgccattgtgttgccgggcaaagtcggcgacagcctgaccctggcccaggcgcaaatcgccgccggtatcagtgcactgcgttgcctggggctgctcaagcaggcgttgggaacgcttgaccagatcaaggccataccgcgcattaccgtgtacgtgcgcagcgctgaagcgttcgatcaacagagtgaagtggccaacggtgcgtcagacctgctgcatgagatcctcggcagcgccggagtgcatacgcgtacgtcggtgggggtgatgcaactgcccaaatcggcggcggtcgagatcgacatgattgccgtcgctcacggttgagtggtccatgatcactcagggcatggcggttttgatcgactacggcgtccacttggcgccggggctggtgctgtttggtgcgtggtttgtgcttacgccgaaaacgcagattgcgctgcgtattctgattctgctgttggcgtttgtgttgatgcgcgatgtgatgacgccgctgggcatgtggaagctgggcagcgaagtgcaaattgcgttcagcgcgaatgcctttgtattggcgatgctgggcggcctttcggcggtgctcgtgatgctgctttcacgcttggcgccgcagctgtggcggttgatgcgctggacgctcggcaacccaggcaccggcctgctggcggggctggcagtggggtgtttgatcggcgtgccgttgcgggtttaccagggtatcgacccgtccggcattcacggctattgggtgtggctgccgggcatggtggtgctggcctacggcgccaatgcgttggaggaggtgctgtttcgcggttttttgcagggctatctggagcagcaagtcagcccattgcgggcggcgctgatcagcggcgtggcgtttgctgcttgtcacacattcctggcgttgagcgtgacccagttgggctggccggtgttgctgtttaccttggttgaaggggtggcgtgtggtttggtgcggatgcgttatggcgtgttaccggcgatcctggcacatggcaccgccatcctgttgattgcggtgcccctgacttgaaatgcggaccaatgtgggagcgggcttgctcgcgaatgcggactgtcagtgataaatatgccgactgatccaccccattcgcgagcaagcccgctcccacattttgaccgcgtttagtctgctaccctgacttaaaatacaagcccatgtgggagctggcttgcctgcgatggcgcagggtcagtcagtaataatttcactgacacaccgctatcgcaggcaagccagctcccacagttttgaccgtgtttagtcggttgtcaggggcggtgtgcggggcgggatctgccgcttgctacccgtcgcttcaaacgccgccgcaaaccgcaacaacgccgaatcatcataggcgcgcccggcaaatgtcaggcccgcgggcatgccgatatccgccatcacgcccatcggcacggtgacggtgggcacgccgaggtggcgaatggcgaggttgccgttggcgacccagatgccgttgctccacgcgatgtcggccgaggcttcgttaacgtcggcatccgccgggcccacatccgccacggtcgggaacagcacggcatccagccccagcctgtccatccagtcttccaggtccaggcgccgggtttgctccaggccgcgcaggccgtcgggcacggtactgatctcgttccagggcttgatgccacgctcggccatgcgcacgtattcgtccatgccggcggccaggtcgtcttcgcggttgggcagggtgccggggtcgtgggggaagatcttcggcccgtccacatccgccaggcggttcagggtcgggtcgccattggcgcgcaggaaatcatcaaacgcccaggccgacagttcccacaattcgtcgtgcaggaactctttggagaccaggccgcgggtgaacacggtcggcgcgccggggcggtcgccttcgcagttggagaccagcgggaaatccacctcgatgacttcggcaccggccgcttcaagtgccttgcgtgcggcttgccacagatcgatcaccgtggcacgggtgttgattttctgcccggtcgggccgccaatgccgggtttttcgctggtgcccgcttccgggtcagcgttgatgtacatgcgcggcacgccaaagcgcttgccggcgagggcttcactgctcacggccagttcggcgtaagacgccgggcgcaccgaggccacgctcgggatcggcacccagggctgcaggcgccacaggtcgccacgggtgtcggggtcttcggcgaccaccacgtcgagcacttccagcaggtcggccatggtccgcgcgtaaggcacgaccacgtccatggtgggggtcagcggccagttgccgcgcaccgaaatcaccccgcgcgacggcgtgtaggcgcacaggccattgttggacgccgggccacgcccgctcgaccaggtttcttccgccaggccgaatgcggcgaagctcgccgccgtcgcggtgccggcgccgttcgacgagccggaagcaaagggggcggtcaggtagttggcgttgtaagggctttcagcacggccatacacaccgcgctgcatcccgccgttggccatgggcggcatgttggtcttgcccaggcaaatggcgccgccggcgcgtaggcgttcaatggtgaaggcgtcgcggtgggccgtcagcttggcgaaagccgggctgccggatgcggcggtcaggcccttgaccaggtaactgtctttggccgtgtagggaatgccgtccaatggccccagggtttcgcccctggcccggcgcgcatcggacgcctgggcttctttcagggcttgcgggttgcgcacgaccacggcgttcagcgcggtggcggtctgcgggccgtcgtaggcatcgatccgcgcgaggtaggcctggaccagttcaacggccgtggtctggccgctttccagcgcagcgcgcaattgggcaatggagacttcggtaacttgcatcacgtttttttcgccgccttcaagtgggaggtatggcggcagtctacgtacagatatttcacaaaaccagcgccccgagtaaggtggcaatccgatgatcaaggttgcactccaaggagaggaatatgcagagaccctattttgccctggccgcgctggtggctttttcgctgtataccgtggcgacgatgctgacggccgaacaatcgttgctggcatttggccgggaactgatttcgcggccggacacggcgcaggtagtgatcgacctgtacttgatggcggtgctggcgtgtgtgtggatgtaccgagatgcgcggggaagagggcggtcggttgtctccgtggtgccgtactttttgttgacggcggtgtttgtttcggtgggaccattgctctacatcgtggtgaaggcgtaccgggatgtgggctcgcgcaaatagggggggcgccatcaagagacgctcagccacaatcagtctcttcctgctgcatgagcactcaatgtgggagcgggcttgctcgcgaatgcggtgggtcagtcgccagatgtatcaactgacacgccttcttcgcgagcaagcccgctcccgcattttgactgtgtacggccactggaatcagattggcacttctgcagttgttatggattgccggtgctcaaggattaaggaacttctgatagttttcctgggtaatttgctgataaggaatcgtcaactctgccgtgtacggctctttcttcaccatcttcaccgctaaatcaatcgagcccactgcctgccctttgttgtcctggtagacggtcaccagcagctgcccctttttcacggcatccagcccggccgggccgccgtcgctgccggccaccagaatgtctttgcccggttgcatccccgcctggctgattgccatggccgcgccgatggccatttcatcggcgttcgccgccacggcgtcgattttcttgcccgacacgatccagttgttcatcaggtcgatcgccttgccgcgctgccattcggcactttgttcttcgacgattttgatacccgggtagtccttgagcacggtcttcacgcccagcgtgcgattgtgcgtggcgttattggaaagcagcccgagcatgatcgcgaggttgcccttgccgcccattttctcggcgaggtagcgcatctggatttcaccggccttgatttcatccgaaccgacatagcccacgcctggcggcacttccttaaactcagggcgacggttgacatacaccagcggggtcttggcctgctgggcattgatcgtcattttttgcgtagcggccgtgtccaccgcgttgacgataattgcgtccatgccctgggcggtgaagttctgcacctggttgagctggcgcaccacgtcgccctgggcatcttcgaactgcagcgtcacgccgggcagttctttggcgtgagcggccatgtagtcgcgcatctgtgccaggaacacatcgtcaacctgcgcgatgctcacgccaatacgaatatcggccatggcccatggggttgcagccaacgtaaagagtgctgcgaggaggtgctttttcatgctgttgctccgttatttttgttgttgttaaagcatcaggcctggcgcttggtccgcatctgcgtgacggcagcggcaaagtccggcaaaggccagcgttctgtaagggcctgctgcatcagttgctgcccggtttgcggcgccagcccttgcaagggcgggtcagtgtcgaggttggtggggaaggaataaccatcagcggtgcaggcgatgaccgcgtcgatggcttcggcattcagcgccgtattggccagcagcactgggtacaccgccagcatcatggagtcgcggtcgagggcctccatgggtttgccgaaggctgaagagatttgcagcaggttggccatgcgctgtgtgccctgcgtgcggttggtgccggcggcgtggaacagcgccgggttgaagaacagcaagtcgcccttgttcaacggtagctgcacggcgtgctgctggaagtagtcgatgaattccggacgtcgccaggccaggtaacccagtgcgtattgctgggagaacggcagcagttgggtcgggccggtttccagcggcatgtctgaatgggccacggcgccttgcagcgtgaggtactgggacagcacgtgcaggggcagggggaagcgttccaccacctcgttggtctggaacccgaggtgatagtcacgatggggctgctgcgcctggccgccggggtgcaccacgttgacttgtgccgtgacttgaaagcttgggcccagccatgcttcggcaatcagccccagcaaagggttggcgtagtactcgacgaaggacgccggtgattccagcgccgccttctgcaatgaattccagatgcgcccgttgctaccggcttttgcgaagtggtcagcggccacgccttgttcggcttcatgggcgaagatggcctcgaacacctggctgtggcggtcgaccacctccaggtcttcataagccccacgcaccaccatcacgccggggccatcgcggaacaaacggtgcagctcgttcatcatggccaggcggtcgctattgcgcagggtccgcgcctgatagatcggcacattgctgaccacctctgcgctcagcggatagtcctcgacgctcgcccgttgtgcgcaaatgcggctgaaatctgccaggcgcaccgcctcggcagtgacgaaagccgacatcacacacctcccggcaggctcagcgcctgatggggctgcggggtgctgctgtcggtgcagccgaccacgccttgctccaggtcgatcaccgaaccggtcatcatccccgactcgcgcgacagcaaaaatgccacgctttgcgccacttcctcaggcttgagcaggcgaccgaacggctgcgcgctttcggctttttcgagccagccgtcttcggcaccgtggtactggcgctggatttcatcttcgtggggcgtgtccatccagccaatattcaagccgttgacgcggatgcggttgcgcagggcgctgaacgcaacgttcttggtcagaatcgccagcgcgcctttggacgccgcgtaagcactcaggaatgactgtccgccatgcccggtcacgctctggatattcaccactgcgccttccacgcccttgctgatcatcaacttcaacgcttcctgcatcaggaaaaacggggcccgcacgttcaccgcaaacaggcgctcaaacagctcgggcgaggtatccaggatggtgccgcggtcggacatgccggcgcagttcaccagcccgtgcagggtgccgaattgcgtgcgtgccgcctcgatgattgcgcggcagtcctcgaccttctcaaggtcggcctcgacaaaaaacgcctggcaatcgagttcagccagttgccgcacctgctcttcgccctgggaacggcggcgcccgcagatgatcaagccagcggcaccgcgccgggccagggtatgtgccaccgcggcacccaggccttgggtgctgccggtgacaacaaagtattggccgctgaacgaggtggcgaggtcggtgtgaggcatggggttctcctggttttttgttgttttcatcgcccggctcgacggcgggcaaaactgagactagcattgcaaaacctcagtaacgcccaaaaatgacctcaaaaaaacctcaggcgaaccgcatgctcgaacgcgcaaaacacttttccatcaagcagctcgcgacccaggccggggtgagcaaggccacggtcgaccgcgtgttgcatgagcgcggcgccgtgcatgcgcagacgcaacggcgcatcgcgcaggcgctggacgagctggaagcccaggaaaaaaacggcctggcggtggggcgcacctttcacgtcgacgtgatcatgcacacgcccaagcgcttcagtgcggcggtgcaggcggcgatcatcgcgcagttggccagcctggcgccgtttcgcatcgcgccgcgttttcacctgttcgaggaaatcgagccccaggccatgcacgaccaactgctgcgctgcctcgacaccggcagccagggcgtggtgctcaaggccgccgatgagccggcggtgaatcaggcggtcaagcaactgatggcggcgggcattccggtcgtgacgctggtcaccgacctgccgcaaagcgagcgcatcggctacgtcggcatggacaaccgcaccgctggccagacggccgcgtacctgatgtcgcgctggctacccgcgcaaccgcaggacgtggcagtggtgatcggcagcgagctgttccggggcgaagaagaacgcgaaatgggttttcgcgcctggctgcgcgggcgggcaccgcacttgcgtgtgctggatatcagcggcggttacggcgtgtatgagcgcacatttgagcgcgtcacgcaggcgctgaagcagcatcccgagctcaaggcggtgtacagcgtcggcggtggcaaccgcgcgattgtcgatgcgttcgctgcacaggggcgcgggctcgacgtatttatcggccacgacctcgatgaagaaaaccgccagttgctgctggaagaaaaagtcgccgcgatcatcgatcacaacctgcagatcgatgcccgcagcgtgttcctgcacatcctgcaacaccaccggctgtggaaggccgggcccattgcgccgtcacaggtgcagatcgtcacaccgttcaacctgccggattgactactcccttcaaaaacaacatcaggagttcgaccatgctacgtatcgccgttctgggtgccgggcgtatcgccaagatccatgccgccaacgtcgccgcccaccccaatgccacgctggtgctggtggccgacccctggcgcgaaggcgtcgacgcattgagcacgcaattgggctgtgaagcggcctacgattgcgccgccgcgctgacccgcaaggacatcgacgccgtggtgatcggcacgcccaccgacacccatatcgacctgttgctggccgccgtggccgagggcaaggcggtgctctgcgagaagcccatcgacctcgatatcgccaaggcccgcagcgccgcccaagccgtcgagcgtcagggcggcaaggtgatgctaggtttcaaccggcgcttcgaccccgacatgctgcgcctgcgcgaggcgttggacgccggccggatcggtgccgtgcgccaggtcatcatcaccagccgcgaccccggcctggccccgcgtgattacctgaaacactccggcggcatcctgcgcgacatgaccatccacgacttcgacaccgcccggcatttgctcggcgaagagccggtggaagtcagcgccttcgccagccgcctggtggacccgagccttgaagaaatggacgactacgacagcgtgatggtgttgctgcgcaccgcatcaggcaagcagtgccacatcaactgctgccgccaggcggtgtatggctacgaccagcgcgtggaggtgtccggcgccagcggtgtgttgctgaccgataaccatcggccgagcacgttgcggcattggagcgccgaacacaccgaagcgctggagccgttgcagcattttttcctggagcgttacgcggatgcttatcgcaatgaactggcgcaatttattgatgcgctgaacagtgggcgccaattgcctacgagcgtgcgggatgggttatatgcgttgtatctggcggactgtgcgttggagtcagtgaagacgggcaggagtgtggcagttcgttacgatctttgatgatccgaaagataagcacggcgctgaagtgaaggtgcctgccatgccccagcgccgaaggaatgagccattcctttggctgtcggcgagttaaagtctttttgaccagtaccgacgagcttgaatttgttctggtgtcagttggggtttcaccttgggaacagcaggcgggtacaactgtttcaaaaaggccttatcaccttcggaaagttcgaaattatcaggtatctcgacattgttggatgttgagcttgcgctgagtccgtagtgcatgatcgatttttgatcgtaggcggacgttatgctattggcggggtcgggggtggcgataatgttgttgtcaatatcttctttggtcactccgggttgcaagaaagacttgtatacgtcgtctttgttgaaggagtaacttcgctgcggatgttgatgttcatgctccagccccaaggcatgtccgaattcatgaagcgtattttttataacgtttgaagtggctttatttacaagattaatatgcatcgtgggtttgtctttcttggccttcagcgccgcagtgcctacagctgaccagtcacctgaaatatctttatgaccggatatacgaatgtcgccgactgtacctttaacaaatttaaactttagattgaccaatggtgcatacgactcaatggtcaatttaatcaggtcttgcgcttttttcggcatgtccatgaatgcaatggtaagcgtgtgattttgtggccacaaataccgcgtgtccgcgatgccgcgtttggttcggctaaccgctgacgtgtcaaggggttcattatttgccggtgcgctgttcgggtccagcaatggaggggtgtgatacatcacaggcgatggagtaatcatgcactatcctcttcaggtaaacacaatatcgactagccaaaaatgagtggctttatcagcaatctggttccattcaaggtaggaggcttctttaccacgcggagggtgaccgccttgattcatgtagtttcaaggcggtcatcttataggcggagttacactcctttagtcgacggcaataacaccgtcagtattccaaccagcggcaggaacgaacagatctcgtagacgtattcgatgccatggctgtcagcgagcaggcccagcaatgccgcgccgataccgctgaaaccaaacatcaggccgaagaagatgccagcgatcatgcccacgttgcccggcaccagttcctgggcaaacaccacgatggccgagaacgccgaggccagtacaaagccgatgatcacgctgagtacggcggtccagaacagatccacgtagggcagggccagtgtgaagggcgcggcgccgaggatcgagaaccagatgactttcttgcggccgatcttgtcgccgatcggcccgccggcgaaggtgcccacggcgactgcgccgaggaacaggaacaggtacagctgtgagctggcgaccgacaggtggaatttttcgatcaggtaaaaggtgaagtagctggtgaggctggtcatgtagaagtatttcgagaacaccagcatggccagtacgaccagagcaaaggtcacccggcctttcgacagaccgtgggtggctttaccgccggttttcaacttgaacaggttgagatggttgcggtaccagcggctcaaaccgtacagcaccagaatcgcgaacaccgcaaacaggccgaaccaggcgatatggctttggccgtagggaatgatgatcgccgccgccagcaacggtccgaaagcgctgccggtgttgccgccgacctggaacgttgattgcgccaggccatatcggccgccggaagccaggcgcgccacgcgcgaggtttccgggtggaaggtcgatgagcctacgccgaccagcgccgccgccagcagaatagccgggaaggtgccgacaaacgccagcatcaaaatgccgatcaaggtactgatcatgcccgccggcagcagccagggtttggggtgacggtcagtgtggtagccgatccacggctgcagcagtgaagcggtcagttggaacgtcagggtgatcaggccgacctgggtgaagctcagcccgtagttggctttgagcatcgggtagatcgagggcagcacagcctggatcaggtcattgatcatgtgcgccagggcgcacgcgccaaggacgcgcatgaccaaggggcttacctggggtgttgtggttgcagcggcgggtgacgcggtcagggtcgacatgcaggcattccatacaaggcagcaaacagaggcaaacggtacttaagccgtttgcccatttcaaaatatttcggcgttcatgctagattcagtgaaaatgcctgtctcgcgaaattcgggcagcaaccatcgaaaaaagggcgaaatgattaaatcactggatacatttctgcgtgagatcgatgagggcgactgggctgtcatcagctccgccactgattaccccgagaattgggtgattcccgaccacagccacgaaaagcatcaactgctgtacgccatcgagggcgtgatggtggtgcactcggtgcagaaccagtggacggtgccgcctaaccgcggattctggatgccatcggggcaggtccactctttgcgctgcgtcgggccgttgaagatgcgcagcgtgtttgtgcgccccgacagcttcccgaatttgccgaccgagaccaaggcggtcagtgtgtcgccgctgctcagtgagctgatcaaggcgtccgtcagcctgaagccgccgtatgccgagcactcacgcgaagcgcggatcatgcacctgattctggatgagctggcgattctgccggcgctgccgctgtcactgccccagcctggcgatgcacgcatcaacaggatctgcgtggcttggcaggccgacccgggggatgcctcgacggtggcggactggagtgaccggctggcactggaccaaaaaaccatccagcgcctgtttcgcaaggaaaccgggctgaccttcggccaatggcgtcagcaggcgcgattgctattggcgctggagcgcattgcggtgggggagaagatcatcgatgtggccatcgagttgggctatgaaagcccgagcgcctttaccagcatgttcaagaaacaattcggcaagacgcccagtcagttttttcgctagggcagatctttttcagatggagcgccggatcagatgtgggagggggcaagccccctcccaccgttttgaacgagcaagccggttcagttgatccgcggatgctgctgcaccaggttctggcgcttggcttccagttcggcaatttcggcgtcaaggtcttcgatcttctgctcgatattgtcgtggtgttcctgcagcaattccttggcctcttccatatccgacgccgccggcgccgcgccacgcaggggtttgttggcggtttccttcatggtcaggccggtgatcagaccgaccaccgcgaacaccatcaggtagtaggcgggcatgtacaaattgttggtgctttccaccagccacgccacggcggttggcgtcacaccggcaatcaacaccgagacgttaaacgcgctggccagcgcgctgtaacgaatgtgcgtgggaaacatcgccggcagggtggaggccatcacgccgatgaagaagttcaggatcacggcgaggatcagcaagccggcgaagatcaggccgatcttgccgctggtgatcagcatgaaggccgggatcgacaggaacagcaggccaatgctgccggcgatgatgaaaggcttgcggccgatcttgtcgctgacaaaaccaatgaacggctgcacgaacagcatgccgaccatgatcgcgatgatgatcagcacgccgctgttttcttggtaatgcaggttatgcgacaggtagctcggcatgtaggtgagcaacatgtaataggtcacgttggtcgccgcgacaatgccgatgcaggtcagcaggctgcgccagtgcttggtcgcgacctccttgaacgacaccttcgggccgtgggtcaggccttcgcggtcgccctgttccattttgtccatgtgttgctggaacgctggcgtttcttccagtgcgtggcgcaggtacagaccgatgatgcccaggggcagggcgaggaagaacggcaggcgccagccccaggcttcgaagtcggcatcgccgagcacgctggaaatcagtaccaccacaccggcgccgaggacgaagccggcgatggagccgaagtctagccagctgccgagaaagccgcgcttgcggtccggggcgtattcggcgacaaaaatcgaggcgccggtgtattcacccccgaccgagaagccctgggccattttgcacagcagcaacaggatcggcgcccaaatgccaatcgaggcataggacgggatcaggccgatggcaaaggtgctcagggacatgatcacaatggtggccgcgaggactttctggcgcccgtatttgtcgcccagcgcgccgaagaacaggccacccagcgggcgaatcaggaagggtaccgagaaggtgcccagcgctgcgatcatttgtacgctgggggaggcgtccgggaagaacaccttgccgagcacataggcgacgaacccgtagacgccgaagtcgaaccactccatggcgttacccagtgcggcggcggtaatcgccttgcgcaccttggtatcgtcgacgatggtgatgtctttcaatctgatgggattgacgcttttcttacgtgatttcatgcaggccactctaaaactgaacaggggaggtgccatcgctgcgatggcaccgctctgtcagttcagatacaaggcgatacgaaataattcaccactaattgcgtttttttgccgatggagcgagcttctccgatcatcacgggagttttctgaatggccgttaacccatcacgccttgtttatcgcccgccacagcctggcgacgtgcagcgattgttcgcgatcttcggcgacccgcagaccaacctgttcaaccccaatggcccgatggcgagccttgctgatgcgcaacgtttgctcgatcactggcttgagcagtgggcgacccaaggctatggctggtgggcgattgctcggcgcgagcagccggaacacatcattggcttcggtggtgtggcaccgctcaattacctcgatgtgcaacgtatcaacttgggttaccggcttgcggtcgaagcctgggggcagggctatgccaccgaagtcggccgtgcggcgctggtgctggcgtttgaaaccctggggctgccggaggtgttcgggttggtgcggccccaccacgcggcgtcgattcgcgtgctggaaaagctcggcatgaagccctttggcgagctggatgatgtgcccggcttggcgccgagcctggtactgagggtttgtcatcctacaactgcaatttcctgaccactttcatgggcgagtaaaacctcgataagcggcaatctttgcgattgacaccgcacagggacctcgatataaaagtcacagttgtacgacgacatatgacgttacatgtgtccttactaaaaacaataaaaagtgatgccatgaatttgaatgagcccatcaacgcccatcgcgtcggccaggccgtcggcaactatcgctggaccatctgcgcgatgttgttctttgccaccaccgtcaactacctcgaccgccaggtgctcagcctgctggcgccgcagttgtccacgcagtttggctggagcaacaccgactacgccaacattgcggcggtgttccagtttgtctacgccatttccatgctgttcgccgggcgctttgtcgacaagatcggcaccaaggccgcctacgtggtcgcgatcggcatctggtccaccggcgccatcatgcatgccttctcggtgccgatgggcgcgggtatcgccactgtcagcagtgccatcggcctggcggtgattccggtgtcgattgccggtttcatgctgtcgcgcgccgtgctggcgattggtgaggcgggtaacttccccatcgcgatcaaggccacggctgaatacttccccaagaaagaacgctccctggccactggcattttcaactccggtgccaacgtcggcgcgattctggcgccgatctgcgtgccgctgattgccggcctgtggggctgggaagcggcctttatcgtcatcggcatgctcggctttgtctgggtggccgtgtggtcgatggtctatgagaaacccgagcagcaaaaacgcctgtcggccgaggaactggcctacatccgcagcgaccagaccgtacagcctttcacgccgcccgttgcaggtgcggtcgagaagaaggtgtcgtggttcaagctgttgacctaccgccagacgtgggcgtttgccttcggcaagttcatgaccgacggcgtgtggtggttctttctgttctggctgccgacttacctgtcggcgcaatacggcatgaaaggctcggatatcgtgatgccactggctgtgctgtacagcatgaccatggtcggcagtattggcggcggctggttccccagctacttcatggcgcgcggcgatgcaccctacgatgggcgcatgaaagccatgctggtgatcgcgttgttcccgctcgtggtgttgctggcgcaaccgttcggctacctgagcttctgggtgccggtgttgttgatcggcgtgggcgcctcggcgcaccaggcgtggtcgtgcaacatcttcaccacggtgtccgacatgttcccgcagaaaaccgtggcctcggtggtcggcatcggcggcatggccggtggcctgggtggcgtggtgatgaccaagatcggcggctgggtgttcgactactacaagtcggtcaatgacattcacaccggctacatgatcatgtttgcgatctgtgcgctggcgtacctggtggcgtggagcgtgatgaaagcgttggtgccgcgtcacaaggaaatcaccgatctgtaaggcgtaaattcccgcgctgccgggcagcgcgggacgggattacagcgcgcgagtccaggtctcatcgatcagcggcttgccaaagttcacggtgggttcttccttgaccaggttgaaccccgctttgcggtagagtttgcgggcatcggtcagcgcatccaccgtccataaaatcatgctcttgtagcccacctgccgggcaaagcgcaggcattcgtccaccaggcgcgagccaatccccatcccccgggcgctggcgtccacgtaaagcatgcgcagcttcgcggtggtttcatcatgacgcaccacgaagaccgaacccaccacctcgccatccttttccgcgatccagcaacgctcgcacgccgggtcaaattcgcgcaggtatttggcggtaatctctgaaaccagtgcctcgaactcccagttccagttgtattcgcgggcatacagtgccgactgctgctgcaccaccaaccccatgtcaccgggttgtgggtcgcgcaacaggtagctcggcgtgcggccttgcagcagcgtctggatgcgctgcatggcgccggtcaattgctgttgttgctgttcgggcatggcctgcagcagtgcgatgacttcctgctgggttttcttttccagcggggccaatacagtgcggcccaggtcgctgaggtgcagttgcaccgcgcgcgcatcggtgacggagcggactttctggatcaggcctttcttttcgaagccactgatcagccggctcaggtagcccgcgtcgaggccaagcatctggcacaaatcggcagctgtcaggtcgccccgggacgacaactcgtacatcacgcggatttcggtcagggaaaagtcgctttgcagcaggtgttcctgcaacacaccgatctggtgcgtgtagaaacggttgaagccacggatgatgccagcgcgttcgacaagggtggtcgtagacatgatgatgctctgatggttgcctgaggcaattatattgttgcctcaggcaatcatgtcaaaacatttcgcttaacggttgcgcgtcactcgccaaagggtattggccaaatcgtcggcgatgatcagcgcaccttttggatccaccgtcacccccaccgggcgcccgtgtgtcttgccgtcttcaccgcggaaaccggtggcgaaatcgacaggctcgccggctggcttgccatcgctgaacggcacgaagaccaccttgtagcccaccggggggttgcggttccagctgccgtgctcgccgacaaacgcaccattggcaaatttatcgcccatctcggggatggagaaatccacccccaacgccgcgacatgtgagcccaggctgtagtccggtttgatcgccgcagcgactttcgccgggttctgcggttgcgcgcgcgggtcgacgttctggccccaatagctgtaaggccagccgtagaaggcaccttcacgtacggaggtgaggtagtccggcaccaaatcggggcccagttcgtcacgttcgttgaccaccgtccacagttgcccggagcccggctgaatggtcagcgcggtcgggttgcgcaagccggtggcgtagggcttgtgcgcgccggtggtggcatcgatttgccagaccatggcgcggtcgatctccacttccatgccgcgttcggtgatgttgctgttggaaccgatgcccacatacagctggcgcccgtcagcgctgatggccagggacttggtccagtggtggttgatctgcgcgggcaggtcggtgaccttgctcggcgggccgctggctttggtctggccgtcggcatagtcgaagctcaccagcgcatcctggttggccacgtagagtttgccgttggcgtaggccaggccgtaaggcgcgttgaggttgtcggcgaacacggttctgagctcatacacgccgtcaccgtcggcgtcgcgcagcagggtcaggcggttgccgcctttgaccttggtgttgccctcggccttgatcacgctggcgatcacgtctttgggcttgagtttggccgcgctgccgccacggccttcggcgaccagaatgtcgccgttgggcagcaccagcgtctggcgcgggatggcgaggtcggtggcgatggcggtcacgctgtagccatccggcactttgggcttttgctcaccccacggcgttggctcggcaattttcatgctcggcaacaggctgctttgttgctccggcaatttggggtcggggccgcgggcctgggtcttgtcgccttcgccaccgcaggcgctcagcagcagcgccgcacttaacaaggtcagtgtgctggatgttttcattgggcacctcccgaacgcaggccggtccaggtggcggccagcgccagcagcatgacgatcgccgacagcaccagcccggcgggcatggcggcgtaggcgtccttggcgtgctggaaggcattgatcagcccgagcacccaggtcgccagcagcaacagcacatatacagtcggttgcccggccttgcgttcagcgcgcagcaggttgaccactgcgaacaggaaggcaaagcctgcgaacaccagggcgccggcgatcagccaggacgcgaagttggcccattgaatctggtaggtctgggtgtaggcgatatcgctgagcaaggccccgagaaacagcggcaccgtgccggcgagcaaggtcgcgtgcagcggcccgggggggtagcggtaggcgggaagggtggtcatggggtggcggctccttgttgtacaacgcccctggggtcggggcagcgcataggaaaggagccttgtatttgtgggaaagttcagcctgattcgtgtcgaaatattatgaaccggccgcgtgcgcccgggcctaaagccgtatcatccgccctttctcttgccaggcgttcccatgactcacccccgcatcggctttgtctgccaataccggcatcccgaacgtcagctttctgccagcgccttgaagctgatcgaaggcccgttcaacccgcgcaccaccaccctgcgctggatggaaagcgtcacaccgcacgtggcccgcgacaagctggtggaaatcgttacgcataacctggccgcccaattgcgcctgctcgcttacgtggccgaactgccgccggcgctgcgcatgctgcgcctgagcagtgacttgctgccgttctacagccacccgaaagtggcccatgtgtacaaagactcggccatcgagcgccaattgattgaaggtttcgccgccatcggcgagctggcgcgcgctgcggatatccgcctgtcgtttcacccgggccaatattgcgtgctgggctcggaaaaccccggcgtggtagagaacagcctggccgaattcgaataccacgccgacatgattcgcatgatgggctacggccggcgcttccaggacctcaaatgcaacgtgcacatcgccggtcgcctgggcgtggaaggcacccgcacggtgtggtcgcgcttgtccgaggtggcgcgcaactgcatcacgtttgaaaacgacgagaagacctacggcctcgaccactgcctgcaagtcgccgacctggcgccggtggtgctggacattcatcattgctggatccacgaaaacgactacatcgacccgcattccccacgggtcgcgcaggtgatcgacagctggcgcggcgtgcgcccgacgatgcattactcccagcctcaggagagcctgcaagcgctgggtttcgatgccgggcaaaaactggaaatggacgcgctgctggcggtggtttccaagcgtgacctctacgcccacagcgcgcaaatgtggaacctgtggaccaatgattacgccctgcagtttctcgaccgcttcgacatcatgatcgaagccaaggacaagaacgtggcgtcccaagcgttttacgagcattggcagcgaagcctggcgtgagctgcgtcattttttgccgttcagtggaatcaccagcgacacccacaggttccagccttccgggcggtttttcgcatcgaactcgtagtaacccttaacgttggcgtaccacaactcgtcgcccaccttgaaaaagtgcccggcctgggggccgatcccggcgacccgtgatttgaagtcgcccagtaccgcgccgctgccactgtcgcccgtcacttgttggaagtaataacccaccaggccgaccagggtctgcgaggtgagaaagtgtgaggcgctcaggtcgatatgggcgtcgacgccgttcttgtagtcggtgtcgttgttcttccagttgtaggtcatgcccgccacggcggagaactcgttggttttatcaaagtaggtgtagccaccccccgcatccagcgccgcgtggcccaggccgatattgaccaggcggttggggtcataggcgccaatcggaatgttgcccatggtgtaggccatgaagttatgcacgccgtggttccatttcagggtgccgagcaggtaaaggtcactgccgcccttgaggctgtcgtttgttccgccggaaaaggagcggccccgcggcccggtcagggttgcatccacgctggcttcggaacgcgccaccgcgccgatggccgagattgccgcctgggcgccaccgagtaccggggtttcaaaggtgtaggtggggctggcgaacagcaggtctgccttggcatccagcccgaccaccgtgcgcccgccacgcgggaccacggcatttttgttgtcgctggcgttcacgtggtagtagatcagcggcaggctccagcccggcgtgaccggcgcggcggccagtgcgccgaactgccccggcagccagaagctgatgccgccgtcgtccgcatgcgccagggtcaggggtaacagggcaagaacgcccaagacgcgcgtttttgtggtcataggacatcctatccaagaggccattcgatgcgtgcggttgggggctgcgctccccgtggctgcttgagcatagttcaaggttgggaggttgttgcgcccatgcgccttggcgggcatgctccttggcccgatagaaggagccacgccatgcccactctgcacctgctctgcggcaagatcgcctccggcaagtccacactcgccaagcagctcgctgcccaacaagccgccattatgctgagtgaagacgcgtggctggcgcagctgtaccccggcgagatcctgtcgatcaccgactacctgcgcagcgcccagcgggttcgcgtcgtgctcgggccgctggtgatcaacctgttgcaggcgggcgtcagcgtggtactggattttcccgccaataccctcgccagccgcgagtggttgctgggcctggcgcagtcggcgggggtaaagcattgcctgcattaccttgaactggacgacgccacctgccgcgcgcggctgcatgcgcgcaatgcttcgggcgaacatgattttgccgcgacggatgccgagtttgagctgattacccgccatttctgcgtgccgagtaccgaggaggggttggtaatcgtggcgcatcgcccgcccgctagtgtcgtgatcagttcctgagtcatcgatacatagctatattggcgctcaagctcccgttacatacgcccagcctatggacttcccatgatcaactttcgcctgattcgccacctgtggctgttccttgccgtcgccgaagagcaaaacttcggccgcgccgccaagcgcctgggcatgtcgcagccacccttgagcgagcagattcaggtgctggaacaggcgctcaaggtcacgctgttcgagcgctcccggcggggtgccaagctgacgccggtgggcgccgcgatcttgccggcggtgcgcaagtttgccgagcagctggagcgcctggagttggcggtggaggaggcggtggcggggcagtcgggcctgctgaccatcggcgcgatttccacggcgatgtttgatgtgctgcccggcttgatcgatcagatgaagcagcaatacccgaacctgacggtctcggtgcgtgaaatcgacagcgtcgaggccgtaccggcactggaggcgggggacattgacctggccttcgcccggctggatggcgacctcgggccggcgatccagtcactgccgctgctggaagaccgcctgatggtggccttgcccagtcaccatccgctggcggcccgggcacgcgttagcctgtctagcctggctagcgaaccgctggtgatgttctcgcgcaaggtcagcccggtgtatttcgacaacctgatcgccacctgccgcgccagcgggttctcgccccgcgtgctgcatgaagtgcgctctgtcgcctcgcaaatcgccttcgtcagctgcggccaaggcattgcgctggtgccggcgtcgttgaaaagacttgcgccgggtaacgttgtgctgcgcccgctgacgcaaaagctcaacgtggtgaccacggcggtggcgtggaacagcgaacgccccaacccgctggtgacggagctggtcgcgcagttccaggctcatacgattggcgtatgaatgcgttccgctatccgtcatttacatcaggcagcaaacccttgaaattggccgcctgactgttccaggagcttcaacatgtcgttcgtccacaccacgttgccgctgacggtagacggcgttgcactgaatatcgccgccctgcgccgtgaaggcgaacgtgcgcccatcgtatttctgcatggctttggttcgaccaaggaggactatgccgatatcgtcctgcactcggcgttcgacgggcacccttttgttgcctatgacgcgcccggttgcggcgagagccagtgcgccgacctgtcgaaaatctccattcctttcctgctggagacggcactgcgggtactggagcatttcgatatccaacgctttcatctggtcggccactccatgggtgggctgaccgctctgatgctggctcaccgtttccctggccgggtgctgagctttaccgacatcgaaggcaatattgcccctgaagactgctttctcagccggcaaattgtggattttcccgccgatgaccctgaagcgtttttcaacgcctttatcgagcgcacccgccacgcgccggcctatgccagcgcgctgtattcggcgagcctgcgccacaaggtgcgtgccggcgcggtacgcgggattttccagtcaatggtcgagctgtccgaccacggcgacctgatgggcaaattcctcggcttgccttgcccgaagatgttcatgtacggcgagcagaacgcttcgctgtcctacctgccgcacatccaggcgaatggcgtgcgcctggcgcccatcgccgagtgcgggcacttcccgatgtattccaacccggtcgcgctgtggcagcagattgctgacttccaccgtcactgcggctaaaccacccgttgcctctcccgccgttatcggctcgacaggcacggttgagcccggttcgcacgccacatgtcgtggccgctgaccaccacgattcccgccagtaccaacagcgaaccgaacacgaaggacgtatccagcttctcatccagcagccacacaccaaataccacacccgacaacggcgtgaggaacgacagcacgccaagccgtgacgccaggtagcgcccaagcaaccagaaccacaccagcaagctcagaaacgagaacaccacggtctggaacgccaggctggcgatggcaatgccggacaggtgcaacgtggtttgcccggtcacacctgccacagcagcgaggatcacgcaggcaccggccaattggtaaaacagcgtcagcggcgcgggcgcctcagccagtttcgagcagcggatgctcaacgtggtcgcgccccaggcgatggcacccagcacgcccagcgcatccccgacgcgctggcgtgtgatccagccttcgcctggcgcagacggtgcgtaaaacgccaccgcgatgccgataaatgcaatgccaatgcccagccattgcacgccgctcaaacgttcgctggcgaaacgaaagtgcaagccgatagcggcgaagatcggtgcggtgtacagaaaaatcaccatgtgcgccgccgaggtgtagcccagcccaaccgacaccgcgatgtattcgacggcaaacaaaaccccgacgatgacgccgcctcgccacgtctgcaggcggcacttttcacgatagcgacgcacgagcaacagaaggcccaccatcacggcggccaccccggagcgcagggcgatttgcagcacgggcgggacatccgcggccgccgctttgatagcgacttgctgaagcccccagatggcacacaccacgatcatcatcacggtggctttcttatcaatcgtctggcgattttccacggcacagctcctctgactcagtgggggtcagtctggcggcgtcgtaacggggggatatagcgagaaaacgacaagcgatagcgcgcaatcgtcattcgttgcgcttcgccgagcctggcaatgggtgatttccggtcacgagtgtgatgagcgccgggctatcgtttctcctagcccggcagcgcaatacttgctccacggcgccaaccggttgccactactcaggagttttgcgatgtacacgatcatgggcgttaccgggcaggtcggcgcagccgtcgccaacgcattgctggcagccggcgagcccgtgcgcgcggtggtgcgcgatgccggcaaaggggcggcctgggccgcccagggatgtgaggtggcggtggccgatgccaatgacgtgcagtcattgacgggcgcgttcagccacagcaaaggcgtcttcattttgctgccgccgaacttcgacccggttgaaggctttgcgcccacccgccagatcatcgccaacattcatcaggcgctctctgtgacgcgcccggaaaaggtggtgtgcatttccaccattggcgcccaggccagccagcccaacctgctcaaccaattgcagctgctggaacaaagcctgggcgagctggacctgccggtcacgtttctgcgccctgcgtggtttatggaaaaccatcagtgggatatcgatgcggcccgcagcggtgtcattccaagcttcctgcaaccgctggataaaccggtgccgatgattgccacgctcgacgtgggccgcaccgccgctgagctgctgcgggaaacctggcagggcaatcgcattgtcgagctgcaagccaccgaaaccgtgacccccgacagcatcgcccaaaccttcgcagaactgctcgggcacccggtgcgcatgcaggtggtggcgcgtgacacctggcaagcgttgtttgagtcccagggcatgcacaacccgctgccacgcatgcagatgctggacgggttcaacgaaggctggatttgttttgaaggcgtgccgcggatcgggcgggttaccttcaaagatgtgctggccggattgttgaacggttgaaccgagggggcaggagggctacttgttgcaaggcagccccgtctgtcaggccgggataagccccgacgcctgataactctgcaccagctcgtcatacaggctcatgtcggcgcgcgtgcgcgcgatcaactgtgcgccggcgatggcggtgtagatcgcacgggcgcggcgctggcacacctcggcgcctcccgtttcgagttcggtcaggcgttcggccagccatgccacgttgatgtcggcaaacgtcagcacttcgcgcttcacctgttcgggcaggtcctggtattcggccgccatgaagctggcaaggcacagccggttgttgttttccagggagtgacgaaagatccccgggtagcgccgcaggcagtgcagcgggtccggattatcctggcgaacagcctcaagcgtcgcggcggcatcttcccaataacgcttggcgacggctgcgccaaggtcagccttgctggggaagtggtaatagatactcgcgttcttgatcccgacggtttcaccgatgctgcggaagttgattccgctgtagccgtaatgttggcctgccgctttggcagcttccagaatggcttcccgagcgttttcgctcacgtgttggtccctcgttcattgagtcgcgtgcgctgattctacgcgcacatttgcttgcctgccaactggtaggtagttgttgacaggcgcgagcaaagctcgcaatctctgcctaccaattgacaggtaggcgataacatcatgacgctccaacaaccacaatccgccgtatcccaagccccgttgctgaaaatccatgactggtacaccggtccctacccggcacgcgtgcgtatcgcgctggccgagaaaggtttgctggcagacaccgcgtttgtgcccgttaacctgtggcaaggcaagcacaaaagccctgaatttctggccctcaactactccggcacgctgccggtgctgcaactgcaggacggcacactgattgcggaatgcacagcgatcacccaatacctggacgtcctggatggccacccgaccctgacgggcactacgcctgtcgagcagggcctgatccatatgatgacccggcgcgcagagctggaattgatggacgccgtcagcgtgtatttccaccatgcaaccccaggtctcgggcccgaggtggagctgtaccagaacgccgaatggggccagcgcatgggtgacaaggcaatccggggcatgcgttatttcgatggcctgctgaagacgcggccgtttgttgcagggaatgggttctcaatggctgacatcgcgctgttcggtggcttgattttcgcaggtctggtcaagttgcccgtgccgcaggaatgcacagcgctacacgcgtggcacgcccgcatgaacgagcgcgacagcgttcagacatggcgcgcgatggtggagcagggcaatctgcaaaaccaaccgagctaaggcagcgcccgggccgtgtctgacgcttgagcgggcacggctccaggggttttgatggtcttggtcacgatgtaggtgaagtaccgttcaatcgccaggtcctccatcagcaactgatcgatgaaacgctgatagccgtcgatgtccgccgcgcgaatcatcgcgatgtagtccacgccgccgccggtggcatagcagaactccacctccggcgcctcggccatgcggtgctcgaagcggcgcatgtcctgggcggtgtggcgggccagggtgatctccaccagcagttgctggcttttgaatacctggttccagtcgataaccgcgcgatagcccttcaccagacccgcgctttccagcttgcgtacgcgctcccaggccggtgtgaccgacaggttgatcgcctcggccaagctggacttggtgatgcgcccgtcctcggaaaggatgcgcaggatgttcaggtcataacggtcaagcttgtgcattgcaggcaaactctgaaacgggcaagtcagtatcaggccatcaacttcggaagctgtcgagccccggcgaggctgcgaaagcggcggcacgggcaaaatctctattggccatgccgccgccatcgcaggcaagccagctcccacatttggccttcgccgccggcaaaagagtgcccggcgcgatggtgctgccaatagcggtatttcaaacaccgcagaacccctgtgggagctggcttgcctgcgatggcggcggcctgggcgaaatctctattggcagtgccgccgctttcacaggcaagccagctcccacaagggtgtgcgtcagtcgaggatttcgctggccacctggtcaatcgcacccttggtgatgtcgacgatcaggtcggcgtcttcacgggtcagaatcaacgggggggcaaagccgagaatgtcgccgtggggcatggcgcgggcgatcatgccgcgctccaggcaggccgccgagactttcgggccgaccttcagcgcggcgtcgaagggtgtgcgctgttcgcggtcggcgatgaactcgacggcggcgagcatcccgtcaccgcgcacttcgcccaccaacgggtggccttcaagggtttcacgcaggcggcggttgaggtaagcgcccacttgctcggcattttcggtgaggttttcgcgctccagaatatccaggttggccaacgccgccgccgcgcagatcgggtgcccggaataggtccagccgtggcccatggcgccgtcggtggtcgaagccttttcgatcacatcccagactttgtcgccaatgatcaccgccgacaatggcgcgtaagcactggtcaagcccttggccgtggtgatcaggtccgggcgcatgccgtagcgctggctgcccattttcgaaccgagacggccgaaggcgcagaccacttcatcggcaatcaacaacacgtcgtacttgttcagcaccgcctgaatcgccgaccagtaaccggcgggcggcaccacgatgccgccggtgcccatcaccggttcgccgatgaacgccgccacggtgtcgggaccttcggcgaggatcattttttccaactcgtcggcgcagtaacgcacgaatgccgcttcatccatgccggccggggctttgcggtaccaatgcgggcacacggtgtgtttgatgccttgttccggcaggtcgaaatgctgatggaacgcggcaaggcccgtgaggctgccggtcatgatgcccgagccgtgatagccacgttcccgggagattattttcttcttctgcgggcggcccagtacgttgttgtagtagcgcaccagcttgatctgggtttcgttggcgtcggaaccggacaggccgtaatagacctttttcatgccttgcggtgcccagtccatgatgcggctcgacagctcgatgatcgcctcggtcgagtggccgacgtaggtgtggtagtaggctagttccttggcttgcttgtagatcgcgtcggccacttcggtacggccatagccgatgttcacgcagtagagcccggcaaatgcatcgatcaattcacggccttcatggtcgcgaatgcggatgcccgaagcgctcttgatgatgcggcctttcagcgcgccgctggcgtggtcatgggcatgggtggacgggtgcatgaagtgtgcacggtcctgttcaaacaggcggtcgagttcgtggttcatagcgagtctcctttgaattgtccttggtggtgcaggcaaaagtatttggtttcgacaaaggcttcgaagccctcggcgctgccttcgcggcccaggcccgaggctttcatgccgccgaacggaatcgggtggccggtgaatttcacgccgttgaccgcgatcatcgcgtggtcaaggcggcggatcagcgggtagatcagatccaggcggttggaacaaacgtaggcggccaaaccgtattcggtgtcgttggccagggcgatggcgtgctccagcgtgtcgaagggcatcacgcccgcaatgggggcgaagttttcttcgcggtagatgcgcatttcgggggtcacgtcggccagcaccgtgggctggtagaacaggccgccgagggcgtgggcttcgccgccgaccaggcgttgcgcgccgagctgcaaggcgtcctctacgcgttctgcggtgacgtcgaaggcggcttggtgcatcagcgggccaacgtccacgctttgctcttgatcattgatcaatgccgggcctacccgcagttcacgcacggcggcggcaaagcgtttgagaaaagccgggtagatcgagcggtccacaaggatgcggttggcggcgcagcaatcctggcccgaggtctggaatttggcttgcacggcgactgtcaccgccaggcccaagtcagcatcggcacacacaatgaacggcgcgttgccgcccaactccagcgcgacctttttcacgtcctgggctgccgcttgcagcaccaatttccccacacgggtcgagccggtgaagctcaccgcgcgcacgcggctgtcctgcaccagggtttgcatggtcatttgtggctcccccagcaccacgttgaataccccggccgggaagccggcttcttcggccagatgcgccagggcaaaggcggaatagggcgtttcatgggccggtttgaccactaccgtgcacccggcggccagcgcggcagcggctttgcgggtgatcatggccgagggaaagttccacggcgtcagcagtgcgcaaacgccgaccggctccttgacggtgcccaggtgcgcaccggggatgtggctgggaatattctggccatacaggcgccgggcctcttcggcaaaccaggggataaagctggcggcataggcgatttcgccacgggcttcggccagggatttgccttgctccaggctgaggatgcgcgccaggtcttcctggtgctccaggatcaatgccgcccagcgtttcaaaatcgtcgcgcgagcctccaggctttgctcgcgccaggcggggaaggcgcggtgtgcggcggccacggcggcgataatctgcggttgttcgagcatcggcacatggccgatcacgtcctgcgtcgccgggttgtgcacggcgacggtgctggcgctgtcactgtggacccaatggccgtcgacatagcacagcgccttgaacagcagtgggtgtttgtaagtcatggtggtggctcccaatcgtctgagtgcagtcatgctagggcagggtggggtggggaaaagcgggtttgacgggggtgtggcttggtgttttttctgattagggtggctcgtacggcgatttctctgggaaccatccctgtgggagccgggcttgcccgcgatgcaggcacctcggtgtcactgcaataccgaggtgaggcaatcgcgggcaagcccgctcccacagggggttggggttatttggcggctttggcgttggcgacccagccgtcgaatgtcgccttgttttcactcatccagtcatccgccagcttgcggatgttgcgttcgctggaaccgtccgcgctgatggttttttcccagtagctccaggtcgactgcgggaacgtcatttgttccaccaatgctttcaccgccgggttggctgcgatgaactgcttgttgccgatggcgtaccagttccacgccgccatcgccatgcggcacgggtcggcgccaccggcgcagccttcgacacccggggtcagcgctgaaaccgtgctgggcacattgcccggcaacgcatcaaacggcgtcggcagccacaccacgtccttgcccgggaccatggtgttggtcatccacgagggcgcccaggcatagaaaaacaccggctcgccacgtttgaggcgggccacgttttcaaacatcagcgcttcgtacttgccgcgcaccgggttgacggtggctttcaagccgaatttttcgagctggtaatccaccacgtcaccgcagccccaacccgggtcgcagctgatcaggtcagccttgccgttcttgccgaacagcgcggcgatcttcgggtctttgagctgctcaaggctggtgatgtggtacgcgtcggcggttttcttgtcgatcatgtagccgttgtagccggcaccggtgatcgagccgccgccaaccacttcggtgcggtccttgaccttgtcgaagctcggttgcagctgtggcaacgtcacgtccatcgacaggtccaggtcgccctgggccgctgccgggaagaacagcgtggtgttgacggtgctcagcttgctcgcataccccaggcgcttggcggcttcgatggcgatcttggtgatgacgtaattgccaccggtactttccgactgcacgaaacggatggtcttgccatcgccgggcagggtctcggccatgaccgaagcgctccccaggtacaacagtgctgcacatgccagcgcggcgttgaatggacgcatcatgatttcctcgttgtttttctcgttatggttaagggtggcagttaaaaccgacgtcatgatttcttgttatgcgctgaccgcccgaagggtgaacagccgcttgaacagcgatttacgtttgccgggcgtgggttgcgcgaggttctgggtgatgcgatccagcatcatcgccagcagcacaatggcgatcccgccgacggcggcgcggcccacgtccatgcgccccagaccttgcagcaccaccaggcccaggccttcggcgccgatcatggcgaccaccaccgacatcaccatggccgtgagcaccgtctggttaaggccacccagaatggtcggaatggccaggggtaactggatttcccagagcagttgcttgcggtcggcgccaaaggccaggccggcttccaccagttcggtttcgaccatgcggatgcccaggtaggtaaagcgaatcagcggcgggcacgccgagatcaccaccgccacctcgcccgatacggtgcccacgccaaacagcatcaccaccggcaccaggtacacaaaagtcggcgtggtttgcatgatgtcgaggatcggccgcatcacgccccacacccgctcactgcgcgcgcaccacacgcccaccggaatgccgaccaccatgcagatcacaatcgcggtggtaatcagcgacagggtggtcatggcttcgtcccacacgcccaatgcggcaatcaccaccagggcgacggcactgaaaatggccacaccaagggtggcggcgcggtaggcaatgaggaacatcaacgccaccatcaccgggaatggaatggcgtggatcagcgtgtcgctgaaccccagcaaatgctccaccggccagcgaatcgcctggaagagcgggcgcaggtgaatgccgatccattccacgcctgtgctgatccattggtccacgggcaatacagcgaggtcttctgacttaagcatggtgtgcaacctccgaaacggcagggcgagggggcgggacgctggcgatgcagtcgaggatatgggcgctgttcagcgtgccgatgaacacgccgtccgtatcgaccaccgccacgggatggccaggtttgagctggcgcgccacttccaccagcttggcgtgggccggcacgctgacaaactgcggcgacaagcgctgcagggcatcgcccccggcaccgacggccagcaaggcgctggaatccagcacgcccacgaccttgccggcggcgttgagtacaaaggcgctggcgctgtcattgccgacgatgcgcgtgtcgccctgtaccagcagggtgctggcgggctgcatgatcgaacgcgcgtcgaacagccttgaacggtccacctcacgggtgaagccggccacgtaatcgctgcccgggtcggcgacaatttcctggggcgtaccttcgcgcaccacttggccgtcggccatgatcgcaatgcgcgtgcccagcttcagggcttcctggaagtcgtgggtgatgaacagaatggtttttttcagggtgcgctgcaggcgcagcaactcgtcctgcatctcggtgcggatcagcgggtcgagggcgctgaaggcttcatccatgatcagcacgtcggcgtcggtggtcagcgcgcgggccaaaccgacgcgctggcgcatgccaccggacagctcgtgagggtggtggtcagcccacttggccaggccgactaccccgagcacttccagggcacgcttgcgccgttcggcgagggccacgccacgcagcttgaggccgaactcggtgttctcgatcacggtcttgttcggcagcagggcgaagtgctggaacaccatggaaattcgcgtgcggcgcacttcgcgcagctcgttttcgttgagggtgaccaggtccttgccgtccagcaggatcttgcctgcggtcggttcattcaggcggttgatgcaccgcgcgagggtggatttacccgagccggaaaggcccatgatcatgtagatcgcgccgctgggcaccgacagcgacacgttattgaggccgaccaccgtggcggtctcggccagaatccggtctttgctggcaccggcggtcaagagctgcatggctcggtcgggcgtggaagagaacactttataaaggttctcgatctttagtcgttcgctcacccattgcctccaattgttgttttgctatctgcggaaatttcatcaagagaaatttttggctactggcagtcaaaggtccgtcggtggtgcagtcgcaagggtgcaacgcaaaaatttcttgttgtcgggcacagcagttacagcatgagcttgtggcgggtgcaagggttgggcgtcagccggtaggcgcgtccatcggcggcatgctttcacgtgccttgcgcgccacacggaaggcttcgacgcccgccggaatcccgcaatacaccgcgatctgcaccagtgctgcgcgcagttcttcgtcagtcaaaccattgcgcagggcgccgcaaaaatgcacgccgaattcctccatgcgccccagcgccgcgagcatgcccaggttgagcaggctgcgttgcttgaggtccagggcatcgtcggtccagaccatgccccagcaatattcattcagcacgtcctgaaagggccgtgaaaaagcgtcggcccggcccagtgcctggtcaacgtaggcgtctcccagcacttggcggcgcacgctttcgccctcggcctgcaatgacttatccatggtgaacctccgaatcggtaagaaagtcgcgcatcagcgccgcgacccgctgcggcgcttcgatcaaaatgcagtggcgcaggcccggcagaatgcgcagggtcgagccttcaatctgcgcgtgcatgaacgccgccatgcgcgggttggagccgaggtcgtcggcgcccgtggcaatgagtgtcgggcagcggatctgccccagttgctcgccaaaatccgactcggccagcacgcggtacgccgccgcataacagcccggatcgttggcggcattcagttggcgcaaacgcaacacggcttgcgggttttgcgcctgaaaatcctcggtcaaccagcgcgccagcgaggcttcgtaatgggccaccggctccccggcttgcagggccacgaggcgggctttgacgcgctcacgctcatcggcagtgcgcccggccacggtcgagagcagcaccaaccgccgcacgcggtccgggtgcgtcagcgtcaaacgctgggcgatcaaaccaccgagcgaaaaccccgccagatcgaaccggttgaaacccacgtgttccgccagcgccagggcctcaccgaccagatggtcgatctcgtagcgccccggggtgcgggaagactgcccatggccgcgcaggtcgaacgtcagcacggtgaagtcatctttcaaaccctgcaccacctcggcccaggcttgcaggctggaacccacgccatgaatgcacaccagcggccgaggtccatgcccatccagccggtagttgagcgtgacattcgccacgctgagctgttgtgaatcgcccatggcttaccccgcgaccgcttcgcggcgtttggcgcgctcgcgttcggcgaacaccggcatcacttcgtcgataaacaggcgcaaggtctgcttctgcaattcgaagggcaggttgaaggtcaggcccaggcaatactgatcgacgccagcggcttcgtagtcgagcagcttggcgatgatctcgtccggggtgccgaacatcaggttgcgccggatgttgtccgggttgtagttctctttgccgcgcaccgcttcaaaaggcaccggctcggggaaaccgttgcgcacggtgccgacgttctgcatcaggttctcgaaggcgcggccaaaatccatgctgtgctgcacgggcacttgccagtcttcggcgttggcatacacacaagtacggcgctgcatcatgaaacgcgggcgtggcacgtgggggttgtcggccacggccttgttgaatttctcgccaagcacggcgatttccgccgcgggcagggagagcggggtggaaaggatattggcgccgatgcccaccgcccagtcgaaagtgcccgggtcgcgcgcggccacccagatgcgcgggtggtccttttgcaggggtttgggcacggcggcggtcagcgggaatttccagtagtggccgtcgtgggcatagtcgccggcccagagtttctgcaccgccggcaccagttccttcatatagccgacgccttcctgctgttgcagaccgggggtcatgcggtcgaactcgtactggtaagaaccccgggcgatgccgaactccaggcggccctgggtcaagtgatcacacagcgccgcttcaccggccaggcggatcgggtgccagtaggccgctgcaatcgttgcggtgcccaggcggatacgctcggtgtgctggccgagccaggtcagggtctggaacgggttcggcgcgatggtgcattccagggtgtggtgctcggaggtccacagggtttcaaagccgccttcgtcggcgatcttcgccagttccagcaagttggccatgacggtctgcatcggcacgtccggggagaaacgttccatgctcagggatacggcaaatttcatgtgaggctccttgaataatcagcgcaggcgaatcacgaacgggtcctgcatttcgccggagtagtcgataaccacgttcttggcgcgggagaactcgcgcatcacgtcaaagccgccgcgtcgcccgtagccgctctgtttgaagccgccgttggctgacatgtaggccgagctgcggtaggtgttgatccacaccgtgccggcgtcgatgcggttggcaaagcgcagggcgcggtcgatgttctgggtccagatccccgaggccaggccgtaagaggtgtcgttggccaggcctatcatttgttcttcggaactgaacggcatcacgccgaccaccggcccgaacagctcgtcgcgcatgaacggcatgtcgttgctggcgtctgtcatcaccgtcggttcgaagtaccagccttcgctcagatgggcggcgtcagggcgcttgccgccgatggctgcccgggcgccttgctgcaggccgctggcgatatagccttcgattttttgcagttgggcgtgcagtgccagcgggccaatgtcggtgtccgcttccatcgggtggccgacggtgatcttttgcgtacgcgccaccaacgcttcgacaaaccggtcgtagatcgaggcttcgacaaagcaacgtgaaccggccacgcagctttgcccggcggcggcgaatatgccggagaccactccgttgacggctttctcgatgtccacgtcggcaaacaccacgtggggcgacttgccgcccagttccatctggcacggcaccaaattgttcgccgcgttaccggcaatgcggcgaccggtatcggtgctgccggtgaacacgtatttggcgatgtccgggtggcgggtcagcgcatcgccggtgatggcgccattgccggtgaccacgttgaccacgcctgccggaaagcccgcctcgatgatcaattcagccagggccagcgtcgaggcgctggcatgttccgacggtttgatcaccacggtattgccgatggccaggcacggcgccagggtgccggtgagcagcatcagcggcgagttccacggcgtgatcatgccgaccacgcccagcggctcgcggctgctgtagttgagctggttgagcttgttgaccgggatcacgtcgccttgcagcttgtcggccatgccggcgaagtagatgtaagcgtcgggcagggcgctcatttgtgcgctcatctctcgcagcagtttgccgttgtcgcgggtttccagcagcgccagttcttcggcgtgctcagccaccagttgcgccaggcggtagagcaatttgccgcgcgcggtgggcgtcatgttgcgccattgcgggtcatggaaggcgcgcttggccgaggcaactgcgcggccgacatcgctggcatcgccctgggcgaactggtaccaggatttgcccgtggtggggtcgaagctgtcgacataggtgccgctggcgggcacgtcgaagcggccgtcgataaacaggttgagacgttggccctcaagggcgctgaccgtggttttcatgcaagtgtcctgtgggtgcggatcaaagcggggcgttttcgagcatcgcgatgcgaccgctcgcggcagagccggtgtagatgccgaactgctggttctcgcgttcgcgggcatagcggcgcaccaccgagcgcagctcgttgacgggcatcagctcaatgggcaagtcgtccagcgggaagaagcgcaaggtgtcaggcagctcggcgtccagcgcgccgagcctggcgcggtagatcaggaaaccggggtcggtgtcgtccacgtcaaacaccgagtacaaaaaggtcgactccagttccaccggcaaggcgctggcaccggcgtcgataaaccctttgcgcttgccggccacgggcagggtccagccgcccttgccgtcggcgcggaacagaatcgcgccgtcggtttcgatcaggtaaccgatgatcatcttgtgcgagtccagccagctggcgggcagcgggtcctggatgttcgcgtagcgcccccggcagaacaccagcggcagctttgggctggtaccgaaggcgcgcacctggccgatcagcaccaagtggtcgcccgcgtcgatgcgttggtccacggtgcagtcaaaccaggtcaggctgtcggtaaggatcggcgcgccggtgtgcacagtgtcgtggtggacggtgtggaacttgtccggcgacttggaggcaaaggtgccggacacctcgacttgcccttcatgcagcaagttgacggcaaagtgttcgctcacggcgaacgcgccgtggctggcagcggacttcccgacgcacaccagcagcagtggcgggtcgagggaaaccgaggtaaacgagttggcggtcatgccccgtgggtggccgtcggcatcatgggtggtgatcacggtcacgccggtcacgaaggtgccgaatgcctgacgcaaagcgcccgggtcgacggctgcaacgtgagtttcggtactcggcatcggagtgctcctgttgttggggtgtgaagcaagcctacgggcggttccagccccaggcttgcagcgatcacgggtaaaacgctggaaaattttgcgcggtttcagagcagcttcagtccttgggccgctcggtttccatctccgccatgtcctgataacggtcggcgatgcgcgggtgggcacgggagccgtcggaggcgccgatggcgatcagcacttcatccgggcccggagcgtcggccacctggaagttggcggtgaggaagtgcgagcgcttgccggtttcgcttttgtgcaccatcggcaaggcgagcagggcgccgggcgcgttgcgggtgttggtgaagctcaggtaggcggtgccttccacggcttcgcggaacaggttgccaaaacgcagggtgtggatcaggcccgaggcgtgttcgatttcaccgttgacgcccacggcggcggccttgccaaaggcttcgaccttgccgccgggcatcagggcgatcaggcggcgggtcatttcatggcccaggccaggtgccaggcgcaggatttcggggcgcaggttttcgacgaacccctggcccgcccacgggtttttcaagattgcggccaccacgatcagcgtgatgggcttgccggcgtccttgcccccttcgataaaggtttcttcgataaaggtgcagtattttctgacgcccagattgtccagattcatgatgaggtgtcgcccttgtggctgttggtttgacccaaggctatgagagaaggcaaaacccgtcttccgccgtttcatcgtataaatgcactggacattgctttgaagtggagcaagtatcagacgggccgggcaggcaccttggctgccatgatccacacgttcgggtgagcgccttgaatcgagaaatgcagatcctgtcgctgcgtgatgtcgccagccagatcaattccgggggcgacctgcagtcgatgctgcaccaactggtgtacgccagttgccgccatacccactggaccatgagttcgatcatggccatcgacatggaggcgggtttcggccacgtcatcgcccggcatgacccgacgcttgtgcaacggccattggtggacagctgggagttgtcgtcgagcccggtgatgaccgcgttgcagcgcaacgagccggtgtttatccgcgatgtgcgcgactgcgagtacccgggctatcgccgtgagtcggtggagcgcgattaccgcacggtgatggtgatgccgatgaactgcaccgacttcgacggccggccgatggtgctcagcgtgatctcgcgcacgttgatggacgtgtccgaagaagaccgcgtgttcctcggcatgatcattcacctgggcgccattgccgtggagcgccagcgccaactggaagccgaacgccgcgctgccgagcgcctgcagcaggcgctgcatgtgcatacctcgatgctggagcatgtgttgggcggtggctcggtgacgtcgctgtcgctgatggtcggcaaccagttgcccaacccggtgatcgcggtggacttcaccgccaaccaggtggtggcggggcgctcgcccgacacagcgctgttcgatgacgccacctggcaggccgccgccgctggcgtgctcagtgtgcaaatcaccaaggccgcgcaagagagcctgcgcagcgcgctgcgcaacaccgtgaacctgttccttgacgacggccaccgcccgttcaccctgcgcgcgcagatcgaacccctgatggtcgaccacgaactggtcggcgcgctggtgctgttcccggtggcggcgccggtcaatgagttggacctgctgatgctcgaaagcgccaagttcgccttgagcgtgcagatgatgcgcagttttatccgctttcgctttgaaacccgtacccagaccgagttgctgttcgaagtgcttgaaggccgttggcgcgatgccgatgacatccagcaacgcgcccggcgcctgggcatcagtttcaacagcgcgcagcagatgatcatcatcgactacggcgccaaggcccgcgaagccaagaacctgcaccacaacgttgcgcgcattctcgcgcgggcgtcgatccccgccacggtgatcagcgtcgataacggcctggtgtgcctggtgccggccgagggtgaaaagggccgcgagcgccgggccaaggtcaagcgccagatggctgatgacttggcgcattacctgggtgcagaacccatcctgctggccagcggggtgtgcaatgcgctggccgactacccggctgcctgggagcgctgccgcaggttgatcgatatcgcgcgctcgtttggccgcagcgggccgatttccgatcaggacttcggccctatcccgatcttcgtggccgccgtgggcggtgaagacatccgcaccttcgtcaacgaaagcgtcggtgcgatgctggaacacgaccgcaaacaccagaccccttacctggaaaccctcaccgcctatctgcgcgaaagctgccgcagccaggcctgcgccgacgcgatgggcgtgcacgtgacgacgctgcgttaccggctggcacggattcaggaactgttcgggattgatgtggaaacgccggagcgccgctttgcgacggagctggcgattcacttgcagcgggtgatcgacagttaagttatggtcattgcctcgaatcgaagtcgccgcgccatgaatacgccaaccgaacacctgatcctcgcacccttcactgacgcactgcccgcgccgatctactttcgcgccgcgcgcatgcccgcgtccgccgcttacccgacccaccaccacccgtggggcgagtttgtgtattcattcagcggcgtcatggaactcaagctcgacggcgtgcatttcattgcgccgccgcaatttggcgtgtggctgccgccgcaggttgagcacaacgcgagcaatcaccaggaagcttgtcactgctcgctctacatcgcaccggcgctctgtgagcgcctgcccgccgaagcctgtgcgctgaccatcacgcccttgatccgcgaactgctggaggaactgcacgcatccccgcccgggccggtccagacggccgaggaaacccggttgctgacggtgttgctcgaccgcttgaaccgcacctctcgcgtaggcagttacctgccgggctccaccgacccggtcctcgcaccgatcctcgccgccctggagcaaaacccggcggatgggcgctcgttggccgagtgggccagcgcggtcaacgccactgaacgcacagtgctgcgccgctgccaacgggatttgggcatgtcgttggcgcagtggaagcagcggttgaaagtcaccgcttcactgcccaggctcaaggccggggcgtcggtggaagcggtggcgtttgatctgggctatggcagttcttcggcgtttataggtatgtttcgcaaactcacgggggagacgccggatgagtatcgaaaaaaacgattgagttgaacctcactttcaaggacaagcatgcccctgatcacggaacgtgtagcactggcccgcaacggcgccaacgataaagtcatttgccggatgccttcaggctgggcggtgatgggcgatgtacagtttctgccgggttattgcctgttgctgcctgatccggtggtctgcagtttgaatgatctggacgctgaagcccgcactgcttacttgctggatatggcccgaatcggtgatgcgctgctgcaggccaccggcgccttgcgcatcaactacgagatcctcggtaattccgaaccggaattgcactgccatattttcccgcgctacgcggctgaaccggacgacaaacgccggatgcctgcgtggttttacgactggaaaaccgccacgccttatgcagaggaacaccacggaaaccttcgccagcaactggcagcgttgctcactgcgggagctgacgcatgatgcaaagaaaccggctggtgcctgaattgacggtgacggacctgggtaaaagcctcgagttctgggtggcttttttggggttcgacgtggcttaccagcggttggaggagggcttcgcctaccttgatctggagggggctcaagtgatgctcgagcaagcggatcccgctgcgaaccaatggtcgaccggcgcgctggagaggccgttcgggcgcggcatgaatgtgcagatcgatgtagcggcggtgcaaccggttattcaacggctggcgcaggccggctacccgctgtttaaagcgtgcaaggatgtgtggtaccgggcgggagaagtcgaggcagggcagcgcgagtttctggtgcaggacccggatggctatttggtgcggctggttgaacggcttggggaaaggccagcggtgggctgacgtctggaagaggggctggcgagtaccggcccctcgtccccggtcaaccggcgacggcgttcagttctgcaaacgcgtcatccggtattttcacttcgcctaccgccaggttttcatgcaagtgcgccaccgttgaggtgcccgggatcaacaggatattcggcgagcggcgcagcagccacgccagtgccaattgtttgggtgtcacgcccagccgctgagcaacgcttgagagtgtggaggattgaacgggggtaaaaccgcccagcgggaagaacggcacgtaggcaatcccgtcacgggccaattcgtcgatcagggcgttgtcctgctgatgggcgatgttgtagaggttctgcacgcagacgaatttgaccagggtgcgcgcttcagccacttgggtcggggtcacattgcttatgccgatgtggcgcaccaggccctgctgttgcagctcggccaatacgctcaatgaggcttcgatagagccttcccccgggcccatcaagttgtacgtcgagcggaagttgaccacctccagcacgtccagccccaggttgcgcaggttgtcatgcacggcctggatcagttcatcctttgacggggctggatgccatccgccttgatcatcgcggcgcgcgccgaccttggtgacgattgtcaggtcatcgcggtacgggtgcagcgcctcgcggatgagccggttggtgatgtgcgggccgtaaaaatcactggtgtcgatgtggttgaccccggcttccaccgctgcgcgcagcacgccaagcgccgcctcgcggtccttgggcgggccaaacacacctggccctgccagttgcatcgcgccatagccgatgcgatacacgtcacggttgccgagggaaaatgtgccgctgttggccaaacgggtcatcgctgtcaccttgcttcacctgagtaaggcactaatatgaaggatccttcagatttgagaattcgcattccatgagcacgctgaaagcctccttgaagccaagaaaatcagcggttcaggcgcggtccaacgccacggtcgaggcgttgcacaccgcaacccttcaggttttgacccagcaagggttgctgcgctgcaccaccacgcgggtggctgagcgtgctggaatgtcggtgggcagcctgtatcagtactacccaaaccgcgatgcgctgctggcggccatcctggaaaaacacctgaccaacgtcgccgaggcggttgaacagtcgtgtgagctgtattcggggcggccggtcgaggacatggcgtgcggcttggtgtcggcgttgctcgcggtcaaactgcaggacccggcggtgtccaaggcgctgtacgcgattgcggcggagcggggcggggcgcagttggtggcgcgcctgcacacgcgcatggtcggtgcaatcgctggcatgctggcgacggcaaccgatacgcggtttgcagaccccgcgctgaccgctgcgatcgcactgagcgccatcgccggcccggtgcgcacgttacttgaaggcaacgcgtcagcggtgttcgagtcgaatatcgcagagcagaccacgctgctcttgaaagcctacctgcaagcccatcaaacgttttaactcactctcaaggaaggcagccttcacatgcgcgaacgcaaagcagcacgactgctggtcatcagcccctctaacgcggtgcttctgttccggtttgtgcacacgaccggcgcgttggccggcgacaattattgggctacacccgggggtggcgttgaagccggcgagactttccgcgacgcagccgttcgcgaactgcgcgaagagaccggcatcgtggtcgagcgcgtggccgattcgctggccgagcgcagctttccaatgaagctgcccagcggcgaaacggtcttggccgtcgaacagtattttgtggttcacgcgcaaaacgaagcgctttcaaaggccgagtggacgctggaagagacccgggtcatggccgatcatcactggtggagcgctcaggcgctgcgcgtggccgaggagacggtattccccgaaacgctggttgaaatgctcgagcaagcaggcgtgtttacacctgcatgacctcgcggctcaactgagaattgcttgggtctcgagcacccgcgcatagtccatcgccaggttgctcagggacagcgcatgcacatcctcggcaggccagagccggcctgacaagtcggtttgatcaaacgtatagcaggcatctgcggccacgatcgtgtcaaagcccaggttgccggccgagcgcgcggtagactcgaccgagttattggtgatcacgccgacgatcaccagctgccggatggcgcgcgcatgcagccagcgctccagccccgtggcggcaaaggcatccgggacgtttttttctactacgtgttcctgttttagcggcgccagggctggctggaattcgcagcccggctgtcccggccagaagaccgagccgggcgtgcgggatatatgccgcacatgcaccacgggccgcccggcctgccgccatgcgccgagcagcgactgcatccgtaactcggcgtccgggttgttccggcgcccgaggctgggccggttgatgccttcctgcatgtcgatgatcagcagcgttgcgtttacgtccaaccgcgtcatggctcgctccttcgatggggtgatgcactctatctcagcgcagcttttcgagcatctggtagtaccacatgcccaccgccagcatcgggttgccgaacacatcgcccagcggcaccttgatgtgtttgcagccggcaaaggtgtcgaatttgcccagggtgccggtcagcgcttcggccatgatctcgcccatgatgtggctggtggcgatgccatgccccgagtaaccctggcaataccagacgttgtccgacagcttgcccagttgcggcacgcggttcatcacgatgcccatcgcgcagctccactggaacgcgatgtccacgcctttgagtgccgggaaggtgcgttcgatgcaagggcgcaactcggcagcgatgtcccgtgaatcgcgcccggaatagttggcaccgccgccgaacagcaagcggccgtcgccggtcaggcggtagtagtcgagtacaaagcggcagtcgtaaaccgccaggtcctgcgggttgatctggcgtgccagctcgcccaaaggcgcggtggtgacgatgccgcccatggccgggaagatcttgcccttgagctgtttgggctcgagcttgtggtaaacgtcaccggccagcatgacctggcgcgcatcgatacggcccccggcggtgatcaccgccggccggtcgccatgaatgatttccagcacctcggagttttcgaaaatcaacgcgcccaggctgtgcgccgcgcgcgcttcgcccaggcacaggttgagcgggtgcaggtgcaggttgcgcgtgtttttcagcgcgccgaggtacagctcgctgtccaggtgctgacgcacgcccgcctgatcgagcaggctgacttggtcgcccatgccgcgccgttgcgcttcgtcgtgaaaggcgcgcaattcggtcatgtgcgagggtttcatggcggcgtgcaagtggccgtgcttcagatcacagtcaatcgcatatcggctgacccgctgctcgatgatttcgtgcccgcgccagcgcaggtgccagatgaaatcgtccacttcatcgcccaggcgtttgcgcatttgttggcgcatcgcctcgtcacccgacaggctgccggtgacttgcccgccattgcgcccgctggcgccccagccgatgcggtgggtttcaacgattgccaccttgagcccgcgttcggccagttccaccgcgctggcgacgccggtgaagccgccgccgatgatcaccacgtccacgctgacctggccctgcaaggtcggatatcgggtcgggtcgttgaggctggcggtgtaataggaagcgctgcgctcggcagtacgtagggctgcggtcatggggtataccttctgataaatgaatgccggtggggcggttcgacttgatcagaagcgtgcatcgggcgggcgcgcatggcggcagtgccacagcgcccagaaggccagaatgctgttgaacagcgggttttcgcaggaacgcgcctgcgccttcgggaacgaagcaggcaggtggcgacgggtggggctcaagggcgacatcatggtcgccgatgctcccaaagcgcgcaggcacgttcaatcagcgtttgtgaaccttcaggtatgggtttgttaaacaatccctggttttcagctgaagcccgttaccgcatggggcgtgtagtttgcctccaggcgttctatttcggcggcggtcagctggatatccagcgcagccaccgcatcatccagctgtgcggccctggacgcgccgacaatcggcgaggtgaccccacgatgcgccaacacccaggccagcgcgatttgcgccatcggcacgccgcgctccttggccagttgctccacggcgttaatgacagggccgtcaacggcgtcagtggcatcgagtacgttcttgccgaaatcatcggttttgctgcgctcggtctgctgcccgtgggggcgggtcaagcgcccgcgcgccatcgggctccagggcatcaaggcgacaccctggtcgaggcacagcgggatcatctcgcgctcttcttcacggtaaatcaggttgaggtaattctgcatcgagacgaaagggctccagcggttggccctggccacttcctgcgccttggcgaactgccaggcgaacatcgacgaggcgccgatgtagcgggccttgccggctttgaccacgtcatgcagggcttccatggtttcttcaatgggcgttgcgtaatcccagcgatgcacctgatacaggtccacatagtccaggcccaagcgggtgaggctggcgtcgatgttggccaggatagccttgcgcgacaggcctttttcgttcggccgggcgacgccctggcccatgccggcggggaaaaacactttggtcgcgaccacggtttcatcgcggcgggtaaatgccttgagcattttgcccaggatgatttccgaggtgcccgccgagtaactgttggccgtgtcaaaaaaattgatgccgtgctcgacggcgtgcttgaagacggggcgggttgcgtcctcatccagtgtccaagtgtgggtgccggcttcgggctggccgaaggtcatgccgcccaggcagaggcgcgacacctccagaccggttttacctagcttgacgtattgcatgcagcttctccaatgtgacgtgttattcggctctcgggccaaaaccggcatacggtttgaggggtacgatggcggtgacttccagcatgccgttgttcaccagcggcagcgtcgcaagttgttcgcgcacgctggcctcgctgtcggcttcgaccagcaggcaggcgccgcctttgtcgccacggtgccagatggtgcggatgaacccttccaggtagagcgccctggcgcgttgggcttcggcgtcgagaaaaggggcgaaatccgcatcggaaaaacgttccgagacgcggcgtgataacgtgacgaattgcatgggcttcctcgcttgagcgcgcgtttttaaacagctcagtgatgatttcaaattaaacggggccggtccaagacgggttctgcaccacctgagacccgattcgcatgaccctggatcttcgtttgctggttgcgtttatcaccgtcgctgaaaccgaaaatgtggggcaggcggcgctgcgcctgcacatctcgcaatcgccgctgagccggcaaatcatgcagttggaggatcaggtggggttgcagttgtttgagcgcacgcgccaacgcatgcgcctcaccgatgaagggcggttgttcctgcgcgaagcgcgcagcctggtggagcacgcctctgatgtggcagccgcggcgcgcaacatcgcgcagggccaaaccggccatatcgtcgtgggctatgtggaaggggcgatgcactccaacttgttgcccaacgccctggcagacctgcaagcgagccatcgctcggcgacctttgatattcaccccatgagttcggcccagcaagtcgaggcgttgcgtggcagggccatcgacctcgggctggtttacgccgttcccgaaagtagcgacattgcgagcacgcaggtcacccgcgaaccgttgttgctggtgctcgccaaagaccacccgctggcggcgcaggagcagatttctcccgaagcgctcaacggccagcgctgggtctcgctggcgcagtccatcaacccggctgcccgccagcgttttctggaacattgcgccagcagcggttttgccccggacattcaggctgaagcaaatgacctgctgggcgtgatgcgaatggtggccgccggcctgggcatcacggttatccaggccagcttgcgcgattgcatggcgggtaaggtggtgtttcgcgaactgccctggtttgcggtgcgcatcgatatccatgcgatctggcgcaaggacgatcccaagccgttgattgccggttttcggcaggcgctggcgcgtttcaccctgcgttaagcgcgctcaggtaggcgcagaacatgtcggccattgcgtcggcatacatcacaatggcttcgtgggtgcgcgggcttgaggagaagtccttgcctgcgcaactgagggtggactggatcaaatcgtgggccagttggcgggtcgcgtccgatgcgttgggcagcagttccagcatgaactcgcgaaatatctgacggcccgcctcgcggacttccagcgcttcgggggcattgcgatacagcggcgccgcgtcatccagcgcgccgcgcatcagcgcttcttcgcactccgaatgaatgaaggcctgcaccagtgtgcgcaaacgctgtaaaggcgcgatctgtcgttcttccagaatcccgcgcagcatccgcgtggtctgctgccactcatcactctgcaagcgaaacagaatcgccgccttgttggggaagtactgatacaccgaaccgacactcacaccggctttctcggcgacccgtgcggtggtgaaacggggggcgccttccttggccaaaacctgaatagccgcctccagaatcgcggccaccaactcggtggaacgggcctgttgcggctgtttgcgcgaggaaatacgcgcggtctggcggttggtcatgggcggctccagcgcgtgggggaacgcgaatagcgaatgcgacgaatcactcgcatacttttaatgcgatgaattagtcgcatcttagtccagaccctacggaaatcaatcatgaccactctgactaccgcaccccttgcctcgctgatcgaacgcctctacgtccaggccaatgcggcgaccagcccgagcgtgaacgaagtgccacgcgaagagcgcgaccgcctgatgcacagcaagaccgaatacatcgagctttacacgctgctcaaagacctgtggctgcccgtctcccgtgacacaggcaacctgctttacatgctggcccgcagcacccgggcgcgggcgattgtcgagttcggcacctcgttcgggctgtccacgctgttcctggccgctgcactgcgtgacaacggcggcggcgtgttgatcggcagcgagtttgaaccgtcgaaaatcgccctggcgcgagagcacttcatcgaaggtggtgtgagcgacctgattgaaatccgtgaaggtgacgccttggtgtccttggcgtcgggcttgccggaagccgtcgacctgctgctgctcgacggcgccaaaaccctgtacggcgacgtgttgaacctggtggaaaaacacctgcgcccgggtgccctgattgtggcggacaacaccaactactgccctgaatacctggcccatgtgcgctcgccgcagaacggctatttgtcggtgccttttgccgatgacatcgaactgtccattcgcctcggctgaatcaaactcttgtggatcacgctcatgacccaacacagtcgtaacgtactgctgaacctgctgccgatcaccctggcggtgtttgtcgctttcctgattatcggcctgcaactgcccgtgctgccgttacacctgaaccacacgctgggcatgagtacgctggtggtgggcgtggtggtgggcgcgcagttcgcggcggcgttgctgtcgcgggcctgggccggcaactttgccgacatgcgcgggcccaagcgcgcgctgttgatgggcatgctggtggccgccagctccggcttgctgtacctggcgtcgttggggtttgtggattccccggtagtgtcggtgtggattctgcttgccgggcgcgtcgtgctggccctgggtgaaagcctgatcatcaccggctccatgggctggggcatggggctggtcgggccgcagaacgccggcaaggtcatggcctggatcggcattgcgatctacgccgcctttgcactgggtgcgccgttgggcgtggcgatcaaccagcaatggggcttcagcggtatcgccgtcggcacgatgttgttgccattgctcgccctggggattgtggcgggcgccaaaggtgtcgcacctaccagccagcggcgcacctcgttttacaaggtgctgggcgcggtgtggttgccgggcctggggctggcgttctcgagtatcggcttcggggtaatcacggcgtttatcgcgctgttattcgcgagcaaggactggggcaatgcgtcgttcgcgtttaccgcctttggcgtggcgtttattggcgcgcggattttcttcgggcacctgccggacaagctcggcggtgccggcgtcgcgctggtctgcgtagtgatagaggcggcggggcagttgttgatctggggcgccggctcaccattgatggcctacgtgggggcggcgttgaccggttttggttattcgctggccttcccgggttttggtgtggaagcgatcaaacgcgcaccgccgcaaacacgtgggctggccatgggggcgtatgtcgcgtttctggacatcgccctgggcatcagcagcccgttggccggtgctttggcgggtgcaacgggtgtggcgtcagtgtatttggcgggtgccgtggccgtcgcgtgctccgtggtggtggcgtgggcattgttggcgaaacaacccgcgctcagcgcttgctgaacgccagccgcgcggcaaacaacacgaagatcaaaccggtggtgcggtccagccactggatgaccttttccctgcgcaggaagccggacagcggtcgcgtggcgccaatcaacaccagcgaccacgccagccccagcaccacgtggatactgaccagaccgaaggtccaggcgatcagcgaatggccttgggggatgaactgcggcaggaacgacacgtagaaaatccccaccttggggttcagcacgttgcccagcatgcctttgaggaaccagttgctgctcggcttgccctcggtttgggcggcggacaacgagcggcgcgggcgcagcagcatgttcaggccgagccaggccaggtaggcggcgccgcagtatttcaaggcgttgtaggccaactccgacaccgcgatcaaagcgcccagcccaaacgcaaccgctgcgccccaaaccaggcagcccgcgttgatgccgagggtggcttgcagcgcctggcgcttgccttccaccgtggcggtacgcaacaccagcgcggtgtcgagcccgggggtgagggtgagcagggtggcggcgaaggtgaaggcgaggaggttgtcggtgatggacatgggccgatgcctgcaagtaaaggtgggtgaaagttagcaccgatcggcaggcggggcgcaaaaccctgagacttcccggcgaaaatcttcataatggcggccaatttgtttagcccgttattctggtgtgcccgcatggaaattaaggtcaactttctcgacaaccttcggcttgaagccaagttcgatgatttcacggtgatcgccgaccagccgattcgctacaagggcgacggttcggcgccggggccgttcgattacttcctggcttcgtcggcgttgtgcgcggcgtactttgtaaaactgtactgcgacacccgcaatatccccaccgacaatattcgcctgtcgcagaacaacatcgtcgacccggaaaaccgctacaaccagatcttcaagatccaggtcgagttgcccgccgacatttccgacaaggaccgtcagggcatcctgcgctccatcgaccgttgcaccgtgaagaaagtggtgcaggccggcccggaattcgtgatcgaagaagtcgaaaacctcgacgccgacgcccaggccttgctgatgcctgcttccagttccgaagcaggcacctacatcgccggtaaagacctgccgctggagcagaccatcgccaacatgtccggcatcctggccgggttgggcatgaagatcgagatcgcctcgtggcgcaatatcgtgcccaacgtctggtcgttgcatatccgcgatgcgcattcgccgatgtgtttcaccaacggcaagggcgcgaccaaggagggcgcgctggcgtcggcgctgggcgagtttatcgagcgccttaactgcaacttcttttacaacgaccagttctggggtgaggaactggccaacgcgccgttcgtgcattacccggatgagcgctggttccagcctgggcccaacgacgagctgccaggcgaaattctcgatgcctactgccgcaaggtctacgaccgcgagggcgagttgcgcggctcgcacctgttcgataccaactcgggcaatgaagcgcgtggcattgtgtcgctgccgtttgtgcgacagtcggacggcgaggtggtgtacttcccgtccaacctgatcgaaaacctctacctcagcaacggcatgagcgcgggcaataccctggccgaagcccaggtgcagtgcctgtcggagattttcgagcgtgcggtgaaacgcgaaatcatagaaggtgaatttgccttgccggatgttccggcgcacgtgctggccaaatacccgagcattctggcaggcattcaagggctggaagcccaaggcttcccggtgctggtcaaggacgcgtccctgggcggcgaattcccggtgatgtgcgtgaccctgatgaacccgcgcaccggcggcgtgtttgcctcgtttggcgcgcacccgagcctggaagtcgctttggagcgcagcctcacggagttgctgcaaggccgcagcttcgaaggcttgaacgacctgccgcagccgaccttcgaaggccaggcggtgaccgagccaaacaacttcgtcgaacatttcatcgactccagcggtgtggtgtcgtggcgcttcttcagtgcgcagtcggattacgagtttgtcgagtgggacttctcgggcgagggtgcagactccaacgcccaggaagccgcgacgttgttcggcattctgaaaggtatgggtaaagagtcctacatggccgtgtacgaacacctcggtgccaaagcctgccgcatcctggtgccggactactcggaaatctacccggtggacgacctgatctgggacaacaccaacaaggcgctgttcttccgggccgatatcctcaacctgcacacgctcgatgacgatgagctgcacgcgttggtcgagcgcctgatcgaaagcgagctggatgactacaccgacatcaccactctgatcggcatcgagtttgacgacaatacggcgtgggggcagctgaccatcctggagttgaagctgctgattttcctggccttgaagcaatatgaagaagccaaggaatgcgtggagatgttcctgcaatacaacgacaacaccgccgaccgtggcctgttttaccaggcgatgaatgcggtgctggagatggaattggacgacgacctggcgttggacgactacgaggccaacttccgccgtatgtttggagatgagcggatggacgcggtgattggctcggtggacggcagcgtgcggttccatggcctgacgccgaccagcatgaagctggaagggctggatcggcatttgcgcctgatcgacagctacaaaaagctgcatagcgcgcgcgccaacatcacctcggcctgacgcaaaccctgtgggagctggcttgcctgcgatggcggcgagtcagcttgcacttttgttgactgacggagcgccatcgcaggcaagccagctcccacagttgactgagtacagccgtgaaatctcggcaggcagtgctaaaaaagctgcacagcgcacgggccaacatcacctcggcctgacaaaaaacctgtgggagctggcttgcctgcgatggcggccggtcagcttgcacttctgttgactgacggagcgccatcgcaggcaagccagctcccacagttgactgagtacagccgtgaaatctcggcaggcagtgctacaaaagctgcatagcgcgcgccaacatcacctcagcctgacgcaaaccctgtgggagctggcttgcctgcgatggcggccggtcagcttgcacttctgttgactgacggaccgctatcgcaggcaagccagctcccacagggggtctctattgtttggacgaccggttagatcagtgccagcgcctgcgccaggtctgccctcaggtcttccacgtcttcaacccccactgacaaccgcaccagcccgtcgccaatacccagttgtgcccgcgttgccgccggaatgctcgcatgggtcatgatcgccgggtgttcgatcaggctttccacgccgccaaggctctcggccagggcaaagatcttcacattttccaggaagcgtgtggcgcctgccaggtcggtgttcaggtccactgaaatcattccgccaaagccgcgcatctgttttttcgccaaggcgtgctgtgggtgagattccaggccggggtagtgaacgcgcgagacttgcggctgattttccagccagttcgccaggtccagtgcgttgctgcaatggcgctccatgcgcaaggcgagggttttcacgccgcgcagggtcaggaacgcgtcgaaagggccggcaatggcgcccaccgagttttgcaggaagccaaggcgttcggccagttccgggttgtggccgacgatggcgatgccgccgatcacgtcggagtggccattgaggtatttggtggtggagtgcaccacgatgtcgaagcccagctccagagggcgctggatccacgggctggcgaaggtgttgtcggccacgcagatgatgccgcggtcgcggcacaggcgcgcgatggcgctcaggtcggtgaggctcagcagcgggttgctcggggtttcgacccaaaccatgcgcgtgttctcttgcaacgcggcttcgaaggcctgcaggtcgctcaagtcgacatagctgaagctatggccggcgctgcgttggcgcaccttgtcgaacaggcggaaggtaccgccgtacagatcattgcccgagacgatatgcgaacccgcatccagcagttccagcacggtggaaatcgcggcgagcccggaggcgaaggcaaatgccgcgctgccgccttccaggtcggccacgcagcgctccagggcaaaacgtgtcgggttgtgggagcgcccgtaatcaaagcccttgtgcacgccggggctgtcttgcaggtaggtggagttggcatagatcggtggcatcagcgcgcccgtggtcggatcgggtgactgcccggcgtgaatcacgcgggtggcaaacgcacttttatcggactgactcatgcaagggatctccgtagatggttaagcaggtcgacgcgggtgatcaggccgtggaagcccgacgcgtcggcaataatggcgaccaggccgcgatccagctccgcctgcaattcggcgaggctggcgccgggggccagggtttcaggggtcttggtcatggcgccggccacggtcatggaaaagtgcgttgcgtcctggtgaaggcccagcaggatgtcggattcatcgatcacgccggccagacgtttgccatccaccagcaccggcagttgtgaaacatccgccaggcgcatgcgctggaaggcggtgagcagggtgtcgtcggggctgacgctgattacgcggccgtcttcaaaacggcgggcgatgaggtcgcgcaggtcgccgtagtgcttgtattgcagcaggccggcgtcgttcatccattggtcgttgtagaccttggacaggtagcgcgtgccggtgtcgcacacgaaggtgaccacgcgtttgggctcggtctgctcgcggcagtaacgcaaggcggcggcgagcagggtgccggtggacgaaccaccgagaatgccttcggccttgagcagttggcgcgcatggtcgaagctttcttcgtcgctgatggagtaggcgtggcccacgctggagaggtcggcaatcgagggaatgaaatcctcgccgatgccttccaccgcccaggagccgggagtttccagtttgccgctgcggctgtattcagccatcaccgaacccaccggatcggcgagcaccatggtcagttcgggttgcacgcgtttgaagaagcgggtcaggccggtgagtgttccggccgaacccacgcccaccacaatcgcgtccacgtcgtgctgggtttgcgcccagatctccggcgcagtgcctgtttcgtgggcgagggggttggccgggttgttgaactggtcggcgaaaaacgaaccggaaatagccttggccaaccgtgcggccacgtcctggtaatactcggggtggcccttgcccacatcggagcgggtgatatgaacctcggcgcccatggctttgaggtgcagcaccttttccgtggacatcttgtcgggcaccaccagcaccacacggtaacccttggcccggccgaccagcgccaggcccaggccggtattgccggcggtggcttcgatgatggtgccgccggggcgcaggcggccgtcgcgctcggcggcgtcaatcatcgcaaggccgatgcgatccttgatggaaccaccgggattttgcgattcaagtttgagaaacagcgtgcacgggccggtatcaaaacggctgacacgaaccagcggcgtattaccgatcagctcgaggacggcggggcgggaaagcgtgggcatgtcgtcacctgaatacgggatgggcgtagtgcggggggacagtaaaaaaagcaaagcatggcttggaacataggccgggattgcgccggtcgcaaccgggcggtccgttggatgtctttttttggcgcattgcggatcaggggtgggctgccgcaaggggcgacggttgggcagccgcctccagcacctgttccatgatcttggcctgccagtcgaaatacgggttgaaggtcagccgtgcatgcaccttgcccggttcgcgataaccccagtccgaataccagacgggctcgcctgcgacgcaccgctggaagtcctcatccgtctggccgttcaggcacacgggctggttgcctttgcgcccatattgcgggttatccggggagaacagcaggcccatatgggagaactggctgatgcgctcggcgggtaaatggtcgctgcgcaccagcaagcgagggtattgctgctgcacggggaggtcgccgtaccagatcattcgcgaggctgggtgggtgaagcgctcgacaaaggtgtttctgacgaagtccacatccacgaccgaatcatgggcagccatcacgatcagtaccgggcgatcaaaggtgtgtgccttcagtttgctgcgcacggctgcgctggtctgatagaactgtgcgaaaccgttggtgggaacattctggtaacgcaggggcgtttgctgttgcctggggccgtcggggtcacgcaaccagggcttgacgtgggccagccagggcagcagccaatcgaaacgattgcgcgccttgaacgccggggaaaacaacaacagcccgctgatagccgggtcatccatggcgttctccagcaccaggttggcgccggtggagaacccgcccaggtagacctggctgacgtcttggcgcatcagcgcgatttgctgcgccaccgtcctgcgccaatcggcgatgtctacgttcaacatgtcggagggttgcgtgccgtgccccggcaacagcagggtgtgcacgcgatagccgcgcgacgcgaggtgcgcgccgatgtcggtaaacgagccgggcgaatcacccagcccatgtaccagcagcacgccgcggccgttgggtgtttgcggcagccattcccggggcgcgttccagtccagttccaggccgtggtcggtgttctggaagcgtcggtcgcgctcaaggttcaacaaggtttgctggcggtagtgttcgaagctgtcgggtgaggactgcgccggtgtttggccagtgcaaccgacgaggctgagcaggaccagcaaacgtaatggcttcatcaacttccccagggcggcacggattggcgactaccctacgcgccggcaaggtcgttagcgaggcggaaatcgccaaaaccgtggggaaaaatatgacgattagttgcgaaaaaaaggcgtaggcggggcgatcagcccacaggctgatcgccactgtcagcaaggtcctacacggggcagtccgcgcccagaaacatttccaaccggccaataaccgtgtcgctggcgcgctgcatggggggccgcagttcactgccaatcaaaccttcaatagctagcgcagcttttactggcgcggggttgggttcgatgaacagtgtgtgtatcaagggcagcaactggaaaaacgtcgcgcgggcagccgccaattggttatcgcgcacttgctgatacaacgcgacaaaacgttcggtatgcacatgggccgaagcagcaatcgctccgctggcacccaggcacagcgcgttgaaaatctggatgtcctcgccacacaacacatcgacctggccactggtgatcactgccagggtagtggcgaggttgccgccgcagtccttgatcgcgacgatccgctcatgggcgacaatactgagcaacgtcgcctgttcgaaggtcacgccggtgcggtaaggaatgtcgtagagaatgatcggcacgctggacgcatcagccactgtgcggaaaaacgcttcaagccctgcctgggacgggcggatatagctcggtgcgggcaccagcaaaccggccaccgggcgcttgaggatttcgcgctggaactgcagcagttcaatctggttgttgcccgataaccccatcaccacgcgctgtgcgggcaccaattgcagtacggcatccagtacggcgagctgttcctcacggctcaatgccgcggcttcgccggtggtggtgcagaccatgatcccggccacgtgcttttccagcaagtggctgaccagccggcgcaggccgataaagtcgatggcgccgccatgaaacggcgtgaccacgggaacccagataccttgaaacgctgacatgcactttctcctgatgattgaccgcttgagtcaccgtcagaagggcagagggaattgtgcaagggggagggggccttcgcgctcaatgtcctgtcagctcatctgacgggacagcgcgccccggtcacatgagcgactgtttcttcgatttgagggcgtgcgccacgcagccttgcgccttggcgatagcgccaatgacggaaaggttaacgagcgacgtggaagacatgaattgtcacaccctgaagaagggctccatcttcaggggatgtgactgaatgtgtcaaccctgccgaagctgctcgcgtacaaattgcgcaacctcggccatcagctcggcatcttccggcgcgcccatgaaaccgccatggggcatggcttcgaatacatgcaactgcgccggtacctttgcctggcgcagggcgcggtgcatgcgcacggtattggaaaggaacaaatcccgcgtgccactttgcaggaaggtcggcgggaagcccgcagtgaaatcgccaaacaggggcgacaggtacggatgggacaagtccgcgccagcggcatacaaccggttggcgcccatcagcgagcctggcagcactacatcaacggtgcggttgacctggaagctgtcgcccgattcggtcaagtccacttccggcgacaacagcaccagcgccgccggcaatggcaagccttcgtcacgggcgcgcaggaccatggcggccgccaggttaccgcccgccgaacgtccgccgatcacaatgtgttccggcgtgtgatgcttgagcacatggcggtagatggccatgcagtcgtccagggcggcggggtaagggtgatcgggcggcatgcggtaatccacgccgtaaccgatcacattgtgcaggtcggcctgtttaccggccgcaatgcggcagttttcaccaccgccgaacaccagtgcgccgccatgcaggtcgatataggcaaagtctgagccatccggcggcgtggccacatgtaccgtggcgttttccacggtgagggtctgcaggttggcgcgcaggagggcggcctgcccggcgttggcgctggcgtagttttggtcgacggctgcttgcaggcgccgccagccgtcgtggtcctcgggggcgggcagggcgtgcaacgcgttgaaaggtacgccgtcggcgttgaccaggcgatcgagcgtggcccgggcctcggcgctgatcgagtggggaaccgggacagtgcgcggttcaagtttgacgccgtggttcatgggcgggcagctcgcgttcgacaacggggagcggcaaggatgacagaacacaggttgttgtgggagcggcttgccagcgaaagcggtgcatcaggcactgatggggtgactcggcggccgccttggcagcgatgcggcgacccgacaagccagctcccacattgaatcttcattcgctcattgaaggactcagtgtccggccacagcggcttcgatggcggcaatgtcgattttggtcatggtcatcatggcgtcgaatgcgcgcttggcgatggccgggtccgggtgtgtgacggcgtcggtcaacactcgcggggaaatttgccatgaaacgccccatttgtccttgcaccagccgcaggcgctcggctggccgccgttgccgatgatggcgttccagtagcggtcggtttcggtctgatcgtccgtggcgatctggaatgaaaatgcctccgagtgtttaaacgcggggccaccattcaagcccacgcagggaatgcccagcacggtaaattccacggtcagcacgtcaccttgtttgcctgagggaaagtcacccggagcatggtgtacagcctttacagcgctgtcggggaaagtgttggcgtagaaggttgccgcgtccagggcggtgccgttgtaccacaggcacagggtgtttttaggggccatttcggatctccacgggggttggggtacgtgaagtctagatgagcgccagagcctgcccggcagatctgccgggcggtttttaaaggatggtgtaatccctgaccacgccattgttgaggtgaatattcaggtgtcgattctgttgctgcggtgcgatgttgtcgatggcggtgcgccgggtatcgatcgcgttatcgtaagtgttgccggggatatggttggacaccagcccgagcaaatggcgcatggacgcattctgggtggtcgagggcgtgtagctccaggtttcggtgccgtcggaagaaatcgtctggtcctgcggctcgccatacagtgctttgagttgttgggaggtggtcttgccggaaatgatgtgggtgcgcacatatgtggtgtcgaacagtgaaatatctggcccgggtttgccctggatacccggcagcgacaaattgttcaagctgccgaggccgttgacgccattggcgcagccggtgagtaacagggcagtggcgagggttgcgataacgctgcggtgggccatgattttctccgtttagtcagggctcaaaaaactgaggctcatcataaaacggcgaaaaaaacctggaaaaaatcttcctgcccctgcgtcccaaacacttgcccgggtgtctcatgccggcttcatttgcccgagaatgttgcgcaacgaaaacccggtgtgccggctcacgcgcccgggcgtatgtgctgcattcacttcacgagcttcgcgcggcgagtagccgaacgcctgcttgaatgtgcggctgaagtgcgcgtcgctcttgaaaccgaactgaaaggccagtgctgacacacgatggcgggtgccttggtcgctctggataatcagccgcgcgcggttcagccgccgctgctggatataggccgccacacccgcttcatggctgaacaatcggtacagttgtgcccgcgaaatgcccaggtgtttgcacaggtataccggtgacaactccgggttgcgcagctgctgctcgatcaactgccgcgcgcggttgaacagcgtgtggtcgatctcgggcccggcgctgtgcaggttggccacagacggagcaagggccgccgagaccatggccaacgtcgcctgttgagcgtgggggatttcatcgggggtgaggtttggcaggcgctgctgcaacgcgcgcatatgatcggccagcagctcgctcaagccgccttgcaacacatgaccatgcacgtctttgtagcccaggccgggtgccagcaggtcacgcgggatggtcaggatcaccgtgtcgccggcggtgatcaggcaatccatttcacgcgccaggtcgaggatgtaaatctgcgagttgccggcggcgaacgctgagcggccggcggagccatggatgctgtgggagaggcccaggcagaggtaatagtggtccaggctgtcgcggcgaatcattcgggtggagcgtttgacccggtaaggcaccggttcgccggcaccgtcccaggcgccgctgcccatcagcaacgcgccgaggtaaccggtggccaaacgataattgaacgccgaggatgccggttcgccgatgctgatatcgaagattgcgttgacttcctcgcgccacacctcgaagcgttgccggggtgggtagggttgggtggtgaaagtgaaaagcgggttctccacaagcggctccatccattaaagctgttgttcgatcgccgccttgtcgatcacggaccagacgtgcgcgattttcccgtcggcgagttcgtagaatacgttttcatcgaaggtgacggtcttgccgttgatcggcaggccgaaaaattcaccgcgtggggtgacgtggaaattcaggcggctggcaaccgtgggcgggtcggcgaccagcagttggatgcgaaacaccaggtcgggaatttcacgaaagtcgcgctccagcatggcgcgatagccttcgaggccaacggtgctgccgttgtaggtcacgtgcgcgtggacgaagtggccgaggctgccccaggcctggcggttcaggcaatcaatgtagcctttgtagaagtcggcgagttcgtttcgggtcatcaacgttctcctgggttcgggcgccgtgcgcgcccggtgttcggaagggtcgttatatcacccgtgtggcacctcgctcgagtaatccatggcacgcaggtcatcgagcaggcctggcccctcgggccgccagttcaactggtggcgcgtccattcgctgttggcgcgcaggtcgaccccggcaaacagggcaaaccaaccgaagtgcgccgcagactcttcaggtttgagcgacaccgtgggaatgcccagacctttggccaccacctcggcaatctggcgtgagctcacgccttgctctgccacggcgtgataacgcgcaccgcgctcaccgcgctcgagaacgctgacatacaactgcgcgacatcactgacgtgggccgccgaaaagcagttcgccccctcgttgatgtaggccgctacgcctttttcccgggccagtgcaacgtaataggtgatcaacccctggcgtacggtgtcgtgaacctgaggcaagcgcaccacgcgtacatcaataccggcctccagttggctgttgccttccagttccgaggcgacacgcgggttggggtgcgcggcattgaacacgtcctcccgcgccaggtcatcaccgccgttgtggcccataccggtcccggaagtgatgatcaaagggcgctggctgccttgcagtaccgcgcccatggcgctgatcacgcggcgctctttttcgcagttggcgacgaaatggttgaagtcatgatcaaaggcggtgtgaatcacggcatcgcagggctcaagggcgctcacccaggcctgcgggtcttccaatgtgccgcgttgagcgtgtgcgcctttggcctccagtacctgggcgctggcatccgagcgcaccaggcctgtaacctgatgtccgtgggcaagcaggtccgacaccacgcgtgaaccaataaagccgtttgctccggtaacaaagatacgcatgtcagcactcctgaagtaaattcaggaggcagcatcaggccaggcgcactgctacaaaagtagtggctttatcagggtatagattccaacaggctagcgatgaccacactttccgataaccccttgggtgatttcctgcgggcgtgccgtttacgcctcgatcccgtgtctttcggcttcgtgaccgggcgccgccgaacggccgggctgcgtcgtgaagaggtcgcccaactcgcccacatcagccccacctggtacacctggctggaacaggggcgtggcggcgcgccgtcgcgggaggtgctgaaccgcattacggcagggctgcgcctgacggcgccggaacgtgagcatttgtggatactcgcgtttggtcatccgccggaaacccgcataacgggcggcgatgaagtgactccgcgcctgcaacgggtgctggacagcatcacgacgccggctattgtacgtacggcggcctgggacgtggtcgcctggaaccatcaggcgacgcttgtgctcaaggattacggccaattgccgcccgaacggcgcaatatcctgcggttgctgttcaccgaccccgatgtgcgcggcgtgcaggctgattggcacgccgtggcccgtctggtggtgaatgcctttcgcgcagacgccgcgcgcctggggccttcgcaagaaatcgatgcactggtgcaggagctctcctgcatcagtcccgatttcgatcatttctggcgcagcaatgacgtggccggatacgaaggcggcctcaagcgcttgaaccatcctcacctggggccgatcacccttgagttttccaactttctggtcgaggggcggccggatttgatgatgatggtgttcaaccagacggcgtgatacggcgcttaagtggcggccaacccatcggcgcgggtggtggcacgcgtggcgcgcagagccatcacccacgccagcatcggcgcgagaacaaacagcgcaaacagccagcgtgccgcatggctggcgccttcattgcccagcgggtcgttgatgccggccatgttcgagatcacaccggccagtgctgcgcccagcgccatcgcgaacagttgcagggtggtgatcgacgacgcagcggtgtccttgtcctgggccgaagccacttgcaggatgcgtgtgagcagatgcggccagcccaggccgatgccgaaaccgaccatgaacaaccccaggcaaataggcgccaggcgcgaccattcaccgacgctggccgaaggtgtggtgactgccagcagcaccaggcccgccacaataaacagcggccccgcgaggatggcatagtgggcgcggcgcccggtccatccggagctgaggatttccgatacggtccagccagccgccatcagcgcggccatatagccggcgatcaacggcgactggccgtgcaggtgttgcaggaaatacggcatgaaaatctcgctgctcatgccgatcaccagcaggcaggtggtggcgtacagcgcgcagagcggggtgctgaacttcaacgcatcccgtggcagcaggcgtaccgtagcccgggattcctggcgaatcagcagcgccaccagcacggcgcaggcgccgatgcccagcaggttccagctgggcagcgacgagacactgcccgcgcagaccgccagcacggcggcggccagcaacaccagttgcggcacgggtaaccgtgcggtttcggtggctgttgcgtcgcggggaggcaacgcccggcaggtgagcacgatgtaggccaggctcaccggtaccatcgaaccgaaggcgaagcgccaagcgtccatctcggcgaacacgccgccaaccgccgggccgaccagcgtcgccaccccccacatgcccgagaccaacgccatcgcgcgtggccacaggcgttcttcgaataccagttgaatcatcgagtagcagagcgcgagcaacatgccgccgcccagcccctggatcgaacggcccgccagcatcaccggcatgctcggtgccacggcgcagatcagcacgccgaccatgaagatgacggtcgctacggcatacgcctgccgtgggcctgtgcgttgcatcagccgtgaggtgagggcagagccgaggatcgaggccaccacatacaacgtggtgctccaggcgtacagcgccaggccaccgatttctgcgaccaccgacggcagaatcgtcgtcgcgatgtaggtattggtggcatacagcgcgataccgcctgaaagggccaaagaacgggtgccgttcttgccacggagtaactcgctccaactgctgtcttgggtgtgcatcaacgattccttgtagtgcttgcgccatctggcgcgcggcgaattgcatgagcgtcaggcttgagttaatttaccaagcaattgctttgaatattgaggtggggcgttttattttgtcaagaaatgacttggaatattcaccggcatccccggcggaccgcgtgctgcacttgctcaaaacccgagggccgcaactggccagcgatatgggcgtgttcctgggcaccagcggggaagcggcgcgccagcagttagtgaagttggccgccagtggcctggttcacgccagctcggaagcgcgcggcgtcgggcgcccgacccaggtgtggcaactgacggcgcagggccatgcacggtttccggacagccattcggaactgacgatgcagttgctgcagaccgtgcgcgagaccttcggcgaggaagccatcgaccgcttgatcgacgtgcgcgagcgccagacccaggcgctgtatgagcgagagatggaaggcatcaccgagttgaaggcgcgggtagaacgcttggcggcattgcgcacccgcgaaggctacatggccgaatggagcgaacaaccggacggcgccctgatcctggtggaaaaccactgcccgatctgcgcggcggccaccgcctgccagggtttttgccgcgcggaattgcaggtgtttgagcaggtgctgcgagcgaaggtggagcgcgtggagcatatacagctgggcgcgcggcggtgtgcgtatcgggtggttcaggcctgagcagggtggcaatcaggccctgcgcgccatcaacaacaccgtcgcggctgccgacagcaaccccgcgcagcagcgattgaagatccgcttgccacttggctcggcaaaccagcggcgcatgtgcaggcccatgtaggcgtaggcgctgatggcgatccattccagcatcaggaacaaggcgccgagcacggcgaattgcggcgtgatgggttggccgggtaccacgaattgcgggaggaaggcggtgaagatcaggatggcttttgggttgcccgccgccaccagaaactcctgccgtgccaacgcccacaatccggctttggccgtgttcttttccgcttgcgcctgcgggttggcccgccacagttgaaacgccaggtaaaacagataggccgcccccagaatcttgatcccgtagaacaacaactccgacgtttgcagcaccaccgccaggcccgcggaggcgagggcgatcatgccggcgaaggccagcaggcggcccagacccgtcaggcaggaagtgcggtagccgtaacgggtggagttgctcaccgacaacaggttgttcgggccgggcgccatgttcagggcgaagcaggcggggaggaaaagggcgagggtggcgaggtccatggcggctccgggctctgtcggactgagagtgtcgaggatagagggagttgcgttacagcgcacgcactgcaacgcagatgtcgcagatgaatactcagaaactgtatttggccgtcaccatcatgttgcgtggagcgccgtaggaatcaccgccataactcaccgagttggagatggcttggtagtaacgacggtcgaagacgttgttggcgttgagttgcaggtccaggtgttggttgacctggtagccagccatcaagtcggtgacggcgtagccaccttgttgcagccggtatttgctgccgtcagccaggctgaggtcgttgtacatgcggctctgccaggaaacgttgccgcccacgcgcagtttttccagcgggccctggaagttgtagcgggtggtcagtttgaacagatgttcgggcgtgtcggtgtcgaactgcttgttgacgttctgcgggttggcggcgtccttgatggtgtgcgtacgggcgtaggtgtagccaccgcctacctgccagttttcggtcaaggcgccttgcagttcaaagtcgatgccctggctgcggatctcgccggaggcctctgcgcaggatgcctgtgggcaattcggcacgaccaccgctaccgcacggttttcctggtccacgcggaacagcgccacgctcgcgttcagtgcgccacccaggtattcgcccttgataccgacctcatagtttttgccgacgatgggtttgagcggggtgcccgaggtgtccttatcgctctgcggagtgaagatgtcgctgtagctgatgtagaccgaatggtggtcgtccagctcatagatcaggcccgcgtaacgggtaaggttgcgggtgaccttgtagtcgccgtcgccatcgcggttgtcgtagtcgtaccagtccaggcgcgcaccgaggatcagcttcaacgggtcggccaggctcaggcgcgtggtgacataaacgccgtcctgggtggtgacttcgcgctggttattggtgtgggtgaaattgggtttgccggcgctgagcggccagttcaggtcgtacgggctgtagttgtgggtggtcatgtcgtagatgcgcttgctcgcgccgaccaccagttcgtgggtgcgcccgaacgcctggaacgggccgctggcgaaggcgtccacgcccgcctgattctcgtcgtaggacgcctggtagacggtgcgtgccagtgtgttgttgacccagcgcgattggtaggaaccggagaacaaggcgtcctgttcggcgtagttggcgttgatctggaggttccagtcattggccaggcgctggcgcaattcagcgaagaccgtgttgatctcctggtctttgttttcccagggggtacccgggttgtaggagcgcggcaggttcaggtgatggccgtcctggccgaccattgaagagccccagaaatagttggttttgtccttctgattcgaaaaaccgagggtaagcgtcgtatcttcgctcagatcggcttccgtaaccgcatagaacaacccgtgatcctcttttgccttgtcgatgaagctgttgctgtcgcggtaagacgtgaccacccggccgcgcagcgtgccactgtcgttgagtgggctggaggcgtcgagctcgccacggtagtcatcccaactgccggcggcgccggtcagggtgactttctgttcatccagcggccgtttgcgaatcatgttgatcgcggccgaagggttgccggcaccggtcaccaggccggtggcgccgcgtacgatttcgacgcgatcaaacatcgccaggttgggctgcgcgcccaccgaaacgccgttgtagccggttggaatgccgtcgtacatcagattgtcgatgtcgaacccgcgtgaggtgtaggactgccggccagggccactggaaaagttcaggaacagcccgggcgtcgccttgaccacatcgttgatgctggtcatggcctggtcgtccatgcgctggcgcgtgatgacggtcacggcctgtggcgtctcacgcagggtgagaggcagtttagtggccgtcgacatcgagccggtggtgtaggagtcggagccttcggtggtgctgcccagttgctgacgggtggtgatttcggtggcgcccagttccagtgtcgtgcgttgtgggttttcctgagtgctgctgtcatcggcaaaagccggggccagggtggccatgcagattgccatggccagaagatcgcgagaaggggtgaaggcgcgtagcggggaagggaaagcgggcatggcaagtccattgttgagagtgattatgagaaccattatcaacaagtattcaggatttaacgcagcgaaacaaccgagtgtgtcaaaagttgtgggctgtccggtttcagcgcgtgcagtcacgatcgcattgagggagtatttgccggacaccaccactgaagttttttaaggagcgaccatgcgagtaaccgttgtaggtgccggggccattggcggctttctggcgtgcaaattgtttgctgccgggcacgaggtgagtgtggtcgctcgcggcgcaacgcttgaggctatccgcgagcaagggctgcaattgcactccggcgaggatgtgctgattgcccgtttgcaagcgacatccaatcccgaagagctgggcgctcaagacttggtgatcttcgccgtcaaggcgcccgcgttagctgccgccgtggccaatgccaaggcgcttgttggtccggatacagtggtcgtgcctgccattaacggcctgccatggtggtacttcctgcagacgacgcaggcgttggcgggcttgcgcctggaggctgtcgatccggggggcgtgatcgaacagggcattcctgccagcgcggtgatcggctgcgtggtctttccttcctgtgcggtactcagccctggcgtgatcaagcacatgtccgggaaccggctggtgttcggcgagccggccggcggcttgagtgcacgcgccgagaccatcgccaaggcgtttcatgacgccggttttgatgctcacgccgacgaaaacgtgcgcgaacaaatatggctcaagctccttggaaacgcctgcttcaacccggtcagcctgctggtgggcggcaccaccgatgagctgatcgacgacccgttcgtgcatgccgtgtgtgtcgagatgatggacgaggtgctggaactgggccggcggctgggcctttcgcccgaaatcgatcccacgcagcgcatcgccatcacccgcaaacttggcaaggtcaaaacctccatgctgcaagacgtcgaaggccaacggccggtggaaatcgaagccatcctgggtgcgttggtaggcgtggccgacagggtcggggcgccgctgcctcgcacgcgtacggtctatgccctggcgaggatgcgcgccaagttgctggggcttttaccgaactgacagcgcaggggaatattccgctcttgtgaaacgttttctgactcagtgcccccatacattccgaagagtatgtgcaatgagcaatggtcagaaccaggcgtttcgcgtaaaccccgaaaagtacctcaccgacaacgtgttgatgaccggctttttgacgcggctcgcgccggtgccggtgtttctatccgaaggcgggattttcagttttgatctggtgcgcgcaggttccacctggtcctttcgcaaagaaccgatcaggatcgagaacgcgccggcgttggagatggtcggcggtgagtcgcccatttccgcgcgctggttgccccagggtggaaacatcatcatgcccttgcggccccggcccatgggggttccggacgggctgatgttcaccgctgaattgagcggctgcacccttgtgatcgatgcaaccccgctgggcttgaaggtgtatcacgtccagccgggccggctggcccaggagtacaccaacgtgcgcgccgccggtgacgtacagcggctgatcattaccgacgtgttctacgactcgggcaacttcaacgctaatgtgctgatgtacaacaacgatggccagtggcgtgtcgcgctgcaacgctggaccggtgcttacatcgggcaactggccggcccctacatcgaccgctacaaaatgcacgatgtcatgttcctggacgtttaagcgctaggggtgaaacctgcgccccaacgcatccaggcgcaccgcaatcggcggcaggcgctcgctgctgcgggccagggtgcccacatcatcggcggtgctttgcgcaatgctctgcaccgcctgcaaccgcccgacaatctccaggttcgccgtggattgctcgcgggtggtggtgacaattcgcccattgagcctatcgatgtgcgcaatgtcgctgcctaccgcttgcaacatatcgacggccaattggctgtcttgcacgcagcgctcgacgccttgctggctgtcgtgcatggcttctacggcgtggcggctgccttgctgcaaaccctcaatgatgtgcttgatttcctgggtggagaccgccgtgcgctgggccaggctgcgcacttcatcggcgaccacggcaaaaccacggccctgttccccggcacgggcggcctcgatggcggcgttgagggcgagcaagttggtctggttggcgatgctgctgatcacttcgagcaccgagccgatttgctcggcttgcactgccaggccttgcacggtctggtgggtgccgctgatgcgggcggccagttgagtgatttcaacctgggcgcgaccgacgctttcctggccccgctcgatttgctggctggccttgcccgcgtgttccaccgcttgctcgacatgcaaggtgatgtggcccatggcgtcttccatgcgctgcatggagccggtcatctgggtgatttcggccagttgatggcgcgcgccggtttccagggtgccgctggcgctggccagttcctggcccaattggccgaggccgtgggagtcgcgggcaacgccgtcgatcaagtgggtcagttgttccaggaaatggtcgaaacgtttggccagggacacatgcaccttgccttcgcctgtggcggtttgcgcggtgaattgcgaagtcacggcgagcatcttctcgagcatttcctggctctcgaccgcttcgcgctggctatgaatggccaggtagagcagggcgaccgtctccatcaccacataaaacgcatgcacgaacaccatggcccagccgccgtgatgctccatcacaaacaccgcaaagccttggtgttgcaaggcatgaaacaccacgtggtgcacagcgatcgtcgccgctgccaccagtatcggcagccagtcgcgataaaacgtcagcacggccagcaacgcgaaaataccgaagtgcgattcgatcacgccttgcgcctggttgatatgcagggcggccatgaccatcagcccggcgccgagcaaacagcgcatcacgcgcgtgccgccaagggcgcgatacagcgttgtcagcaccacactggtgccgcccccgacgatcacggcttgaatcaacgtgtcgtgccagaacgccaggcccagcgagaacacaaacatcagccagatcaacgccagcatgatgcggtcggccttgcggtagtgctccataaaacgcgtgcggacgggcattcactcgtactccatgtggtcgagccaggaacaaagcatggggcgtgccaccgttgggcaaggtaatagcgtatcggcatcattgagttggacttgagggtttgcaccctgcacaggatcactgtcggcagcgtttaaacacgcaaacgactgagggcgcagcgctagcgctatagttgtttttacacaacgcaacgtttaatcatgcacggcaattcctaacttacaagtcaagaaaaggacgcttctccatgaaagtcagtgcacgtaacgtattcaaaggccaggtcagccaggtccagagcggcgccgtcaacgccgaagtggtgctgaccttgccgggcggtgagcagttggtcgcagtcgtgaccctggaaagcgtgcgcaacctgggcatcgccgtgggcaaagaggccgttgcgctgatcaaggcgccgtgggtgatgctgatgaccgagtccagcgacattcgcctgtcggcgcgcaactgcctggaaggcaaagtactgagtgtgaacgacggcgcggtcaacgctgaagtggtgatcgagctggccggcggttcgaaggtttacgccattgtcacccgcaacgccgtggccgagctgggcctggcgccgggtgtaagtgccacggcggtgatcaaggcgtcgcacattattctgggcgtgcccgcctgatcaccgccatgccatcagtcacaggtggtcggcgtcaatcaccgccttcgcaaacgccgccggcgcttcctgtggcaggttgtggccgatgccgccgctgatcaggcgaaattcatacttgccggtgaagcgcttggcatagtcctcgggctgcgggtgcggggcgccgttggcgtcgccttccagcgtgagggcgggcacgccaatggagggtgataacgcgagcttctgttccaacgcgtcatagcgggtttccccctgtaccagccccaggcgccagcggtagttgaacacggtgatggccacgtgatccggattgtccaggcccttggcgctgcgttcaaaagtggcatcgtcgaaggcccatttcggcgaagcggtttgccagatcagcctggcaaaatcgcgcgtatttttctggtagccagccgcgccgcgctcggtagcgaaatagaactggtaccaccactgcaactcagccttgggcggcaaagggtttttgcctgcggcctggttgccgatcaaatagccgctgacggataccagcgccttcaccctttgcggccacagtgccgagacaatatctgccgagcgggcgccccaatcgtagccgccgagtacggcctgcttgatgttcagtgcgtccataaaatcgatcacatcctgggccagtgccgcaggctcaccattgcgcagggttttatccgacagaaaccgcgtgccaccgtagccccgcgcatacgggatcagcacgcggtagcccttggcggccagcagcggagcaacgctggcgtagctgtcgatatcgtagggccagccatgcagcaggatgaccacctggccgtcagctggccccgtttcggcgtaggccacatccagcacgccggccttgacgtgcttgagcgcgccgaacgaggaatggctggcggtggctggaatattgatctcgggcatttcggcactggcggcgccgatgacaccgaactgcagcagcgcaaaagccagaaaagtggagcggcggttcaacggggtgtgcatggcgagcctcctggggcgtggtgtgtgcctggcccacagttgaccgctgcggtgtatcgggtgtgtttcagcaaaggccccgggttaaacgctgtgtatcgtagtggccgctgtacacactgcgatacacaggcgccggccttctacgaaaacacaatctcgtagggctcgcgcatgcgctccagtaactcgtgggcgagcctcggcgccaggccaatcgccgggtcgccgaccaactggctggcgtaggcatgggtggcgtgcagcttgcgcgccacgctccaggtgtccaggcgcactttgcgtgcgcgctgccaggggataatcgccccctcgcgcacgggccaatgccaggcccagatcggcagttcatgcaagcgtgcgccgatcaggctgcaggctttggcgctggcacggcccactgcatcgtggtcgtcattgccgtcgttgcgccaggtggtgaagaccgtgtcgccgggcagcaggtagcgcgcaatgaattggctcatgggctgctcgctggccgccagtgcatcgtcacaaaacccgccgcgaatccacttcaggctgtgcaagggcatgccaaggcggcgcagggcttcagcgctttcctgagggcggataacacttaggcggctcgcgggccaagcgttcgaccccgggtggctggcgctgccgtcggtgatcgaaatcagcagcagcggatggttcagggtgctgagtatttgcagcagcccgccacaggcgagcacctcatcgcccggatggggcgcgatgactaccacgcgggcacccggaggtaccagcgaggtgggcgtgatagcggggatttgcgccagctgcggcgcactgttccagatttgcgcggggccgcgacggccctcgctcagggaggcaggtttcatgggtgtcacatccttgtcgattgatgcgggtcgtgccccgttgacgggacgactctcttgtaatcaccacaggctccgctgcggtgaggcgcggcactccagtcctggattgccagcaaggcactgtcagcatagacaaggatgtagcgctcttacatcgtgaaatgtggatttttcaggtcgcgtgcatcaggctctttaaataatcaccaaagccgccttccgcccggcaatccaggcgggcgctggtgatgacttgtggcgtatggctccaggcgatcgatgcaccgcagcgctccaggtcacgcaccagttgcacatcttcatggcaggccagcggctcgaacccgccggcctgcacataggccccggcactcacgcccaggttggctccatggacatggcggtggccgtcgcatgcctggtacgcctggtgataacgaatttgtgcggccggatcgaaaccctcactccacgcgtcgacggtgaccgtgccgcacaccgcatcgacgcccagcgccaattgcgccaccagccaatcgggggcgacccggctgtcggcatccgtgcaggaaatccagcgggcgccctgattcaacaaatgccgtgcgcctacgccgcgcacatgcccgacattgcgcgcctgcacgtgaagtacctgtaccggatacgcctgggcaatcgccgcactgccatcgctgcacgtatccagaaccgccaggatctgcacaggttcacccagcaacccggggtggctggcagcaatcatcgcggcgttcaggcattcgcccagcaggtcttcttcgttatgcaccgggatcagaataccgatcatcgcaggccctcgcgtgtggcaaccgaggcgccatcgcggccccacaggtcaagcaggaaatcagtctcgtggtgccgggcaaggtggggcatgtccagccgtttttgcagcaaggcatgtacctcttcagccgtttgcgggcagccttcgattgccgggcgccagtgacaggccagcagttggccgtcgtcgaccagggaggcgagggcacggtcaatcagggtgttgaggtcgtcaatgtcgaggtagtaacacagctcgctcaacacaatcaggtcgaacgggccagcgggccattgttgtggcaagcggctttgctgtacctgtgcatgggcaaagcccagcaggcgtttttctgccagggcgacagccgcgctcgccgtgtcgcaacacagcagccgatcacagcgcggtgccagttctgcacttaattcaccgttggcgcagcccggctcgaagatcgacacatagtgcgggcgggtcagcacagcgagggtcaaggcgcgtttgcggcgttcataccaacgctggcgaaacgcccaagggtcgtcattgcccgcaaagagttggtcgaaatacggcgtggcaacgctcatacaaacaccacttcaaagggttgcagcaaacgctcgacgacatagggcgccagcaccggcgcgaggccaatgtgcgggtcgccttcgagctggctggcaaaggcatgaatggcatggcgtttgcgcgctaccgcctcgggtgtcagcgggatcttgcgcgcacggtgccacggcacttggctgtcttccggcgtcgcccaatgccaggtccataccggcagctcatacaaggtggcgccgacagcctgtgcggcccgggcactggcgcgcccgacagcctcatgatcgcaatggccgtcttcgcgccaggtggtgaacactacatcggtgggcttgaggtagcgctcgataaacgcgctcaacgggcgttcactggcggccaccttgctgtcggtaaaccctgcccgtagccatttcaggctatgcagcggcaagcccaggcggtgcagggcctgggctgattcctgcgggcgtaccacgctcaaacgctcgaccggccagcgcctggagccgggatgactggcactgccatcggtcaccgaaatcaactgaatgggcctccccagcgctgccagaccttgcagcagcccgccgcagccgagcacttcgtcatccgggtgcggcgcaatgatcactgcgcgatggccttcgggaaccagttgttcaacgctgacctttggcaactcggccatatgggatgaagcttgccactgatgcagcggcgttccctggccgacgattggattgggtttcataattgccacctccctgtgggttcacccgccacctgttcgcccagggcggccaagtcacgttcggcatggctttgccgcacgtacaccggcaaatccgccatcaactgggcaaagtgcgggtccttgcaatacgggcctgcgccgacggcgcgcccgacatgatgaatcacttgttcgacggtatcttcgacgcaggcgcgtacttgctgggcgagcagccgggcatccgccagaggcgtgcggtcaacctgtgccgcgctgtcgcgcagcacgcaggcggcgctgttcagcgcactgtccacggcgcccagatgcgccagcgcatggggttcggggcgcttgctacactgctcgcgcaacgcctccgccaggcgttgcgctgcaccataccagcacgcggcaatgccgatgccgccttgccagaacccgggccgtgcgaggtaatcgccaggctcgccaatcgtaattccccgggcatgctcaaacaccacctcaacactgccggttgccgccatgccgacggccttccatccgtcatcggtcacgctgacccccggctggtgcatctgcaccgcgaccaactgttgacgatcctcttcatcccaggcggtcagcagcccgtggctgaccaccgccgcccccgagcaccaggctttacgcccgtcaacaatcagccactgaccatcacgccgtacccgcactttggcgttcggcggctcggcggcccacatgccccacgtgctgcccacgggcggcaaggggctattgagttcggcgatgattgccaaagcatccgtatggccttcaaacaacttgcacaggcgcaggtcatgcccggccacctgtgccaagcggctgaagcgctccagcgtctggccgctgccgggcaatggcagttggtccaggccttcctcctgaagggccttcagggcatcgcccagggcctgcgtgtccgcatagccccggttgccttgaaggaatccgtgcaaggccatgtcacacctcgtcgtcgcgctgcagttcaaacagcaacagtgagcggccggtgaccgcgtactcatgttcgaaatcaaagcgctcctggccacgtacggccggcgcattggtgtcgagcatgcaggtccagaactcaccttccggcaccggtggcaggcggaaattgaccatgtcgtggtgggcgttgaccaccagcaacagggtggcatcggcaccggcccggcgaattccggtctcctgggcacgaccgtccagcagcatgcccaggcagcggccatggctgtcctgccattgctcggtgttcatctcgttgccattcggggcgagccaggtgacatccttgacgccgatatcctcgttgtaatcgccgaccaggaaccggccacggcgcaggatcggatacgccaggcgcagcttgatcagacgttttacaaatttcagcagggccttgccgtcatcgtccaggtcccagttgacccagccgatttcactgtcctggcagtaagcattgttgttgccgtgttgggtgcgggcgaattcgtcacccgccacaatcatcggcgtgccctgggccagcagcagcgtggcgaagaagttgcgcatctggcgcaggcgcaacgcattgatttgcgggtcgtcggtcgggccctcgacgccatggttccaggacaggttgttattgctgccatcctggttgttctcgtcgttggcttcgttgtgcttgtcgttgtacgacaccaggtcgtgcagggtgaaaccgtcgtgggcggtgatgaaattcaccgagctgtaagggcggcggccacggtggttgaacatctcgcccgaggcggtcatgcgcgcggcgaagtctgccaactggccgtcgtcgcctttccagaaggcgcgcacggtgtcgcggaaacggtcgttccattcaacccagcccggcggaaacttgcccacctggtagccgccggggccgcaatcccaaggctcggcgatcattttcagctggcgcagcacggggtcttgccggcacgcgacgaggaagctgtggcgctcgtcgaaaccctcgcggtagcgacccagaatcgtcgctaggtcaaagcggaaaccgtccacgtgcatctccgtggcccagtaacgcagggagtcggtgaccatctgcaagacgcacgggtggctgaggtcgagggtgttgccggtgccggagtcgttgatgtaaaagcgcttgtcgtcgggcatcaaccggtagtaggaagcgttgtcgataccgcgcatggacagggtaggcccgcgctcattgccctcggcggtgtggttgtagaccacgtcgaggatcacttccagcttggcttcgtgcaggtgcgcaaccatctccttgaactcggcaatcttgccactggccaggtagcgcgggtccggggcgaaaaacgcgatgctgttgtagccccagtagttggtcatgcctttttgcagcaggtgctggtcattgacgaaggcgtgcaccggcagcaattccaccgacgacacacccaattggcggatgtgtttgagcacgtcgtcttccatcaagccggcgcaggtgccacgcaccgattcgcccaccgaagggtggcgcatgctgatgccgcgcaaatgggtttcgtaaatgatggtgcggtcccacggcacgcgcaccggttggtcgttgccccaggtatgcgccgggtcgatgaccttgcatttaggcacgaacggcgcactgtcgcgttcgtcgaaactgaggtcgtcgtccgggtgaccgatggtgtagccgaacagcgcctcggaccatttgagttcgcccaccagctgtttggcataggggtcgatcagcaatttgttgtggttgaagcgatggccgttggccgggtcgtacgcaccgtacacgcggtagccgtaaatcagcccgggatgggcgtcgggcaggtagccgtggaaggtttcgtcggtgtattccggcagctcgatacgctccagctccacttcgccggaatcgtcgaacaggcacagctcgactttggtggcgttggccgagaacagggcaaagttgacgcccaggccatcccaggtcgcgccgagggggaagggcaaaccttcacgaatccgcgacggctcgttttccggcgtcggttggcttttatcgggtttgctcatgcttgagttgctcctgcaaaggtcttttttcaggccgagtacggccatgctggcgggaagccaggtaaaaattcagttcaaagtgcggtcacctgtgggagcgggcttgcccgcgaatgcgtcgtgtcaggcgacaacgatgttaggtgtgccgacgctttcgcgggcaagcccgctcccacacgggggaaggtgtttagcctgctggcttgggcggcgccttgggctttttcggcgccgcaggcttggcggcggcggcgggcttggctttgggcgctggcttgggtgcagtcttgggcttggccgcaggttttggcttgcttggcgtcaacgcttcggcttctgccagtttgcgcgccatctcccagtggcgtgcatcttcaccgtggggtttgccttccgattcccagatctgatgcgccaactcgcgaacacgtttgtcttcagtactcatcacaatgctcctcagagaaaattttcagctttcttgatcatcaggattgataaagacattgaccgggaaatcccccagggcagtgctgatcagcaggtccttgtctggtgtgactgcgcccgtgtgaaaaagtcccttccagttttgtgttgcaacggcaaacggtaatttcacccgcgtatcgccccaaacctgcgcatcaatgtgaggcaaatcaccgttttccagcaggcgatggggcagacgaggcaccaccaccagcaagtgtttgccctggtgttcgcggcagaaagcgacgacgtgatccgcgtgttggccggtcacttccagcgggatatagctgccgctgcgaaagagctcaggatcggccgtgcgcactggcaacacctgggcaatcagcgcctgtttgatacgcccgtcacgccaatggggcaacagctcgccgacgtccggcgcagtgttcagcgcctgttgccgagcgttgaaatccaccgggcggcggttgtccgggtccaccaggctgaaatcccagaattcatcgccctggtacaaatccggtacacccggcacggtgaggcgaagcaaggtttgcgccagcccgttcaatgcgcccgctggcgcgatagcctgggcggcggcgccgatggcggtgcgcagcgcgcggccttcttcactgagcaacaggcgtgacaggaacgcttcaaccccttgctcataagcctcgttgggcgcgctccagctgctgtgcaacttggcttcgcgcagggctttttgctgccactgccacaggcgttgctgatagccctcaaggttcgcatcaaggggccaactgcccaacaacacctggtagaggatcagctcatcgcccgccgaagggctgttttgatcgacacgcaaaggcgccgctaaagtgcgccattgctcgacctgctcgacataccagggcgcgcactcgctgagcacggccaggcgcgcacgggtgtcttcgccgcgtttgtgatcatgggtggcggtggccagcaggttgtccggaaattcccgcaagcgctggctgttcaccgcatgaaactcgtcccgcggcgcactgaactgctcggtgctgaagcccacgtcattgcgcgacaacaacaccgccgagcgatagaacgcggtgtcttccaccgccttggcggcggcgggcgaggtcaattgctgaaagcgcacgcaggcatgtttgaggatcttgcgttcccggcctaacgggcgatcgcgccacggctggccgcccagccagttttccaggtgttcgaggaccggccagtcgccttcgccgagggtgctgcgcgcgccctccatggcctgctggaagaacacgtcatcttcggcgctgcggccccgggcgctgatataggtgcggtacaccgggaagtgcacaatcagttcctgcaacgcgcggcggatggcgccaagcgtcaggtcgcgagtcatcacatcgtcgcgggccacttgcagcaaggcctgggccacactttcgaaatcaccgcccagggaaccgttgaggatttgctggcgcgccagcctggcctcttcgataaaggccgaggggcgctcgctgtggcgcgtccacagatcggcgagcggttcgaagccggccggatcgtgttggagcaacgagagctggttcatgaattcgtaacctgtggtgccgtccacctgccaatcacgccgcaggatttcgccttcaccgaggattttttcgacgaagatcggcaagtgccgctgcggcgacagtgcgtccacgcgacggcgcagcttgcggcaataaccccgtgggtcggccagcccgtcgatatggtcgatgcgcaagccgtccaccaacccctcactgatcagctcaaaaatcttcccgtgggtggcctcgaacaccgccgtacgttcaacccgcaggccgccgagttcgttgacgtcgaagaagcgccgccagttgatatcgtccgctgcggtgcgccaactggcgaggcggtaggcctgttgttccagcaattgatgcaggcgctggaaaccatcaggttggcggccgtcgaaagtggccagcctttgttcgatggccggcaacacttcagtggcgcgttcggccagcgcgtgtttcagccaaccggcttcggcatgggcgtcgtcctgccaagtgagcgcggtgaagcggtcggccagggggttgagcaactcgccgtcgcccagaatcgtcgcgtaatcccgtgggcagatggggaagcgatgctcgtaatgctcgacatgaaacgcgccgtgggtggcgtcgaattgcagggtgagcgtgccggtttgcagggcttcgccataatcgctgcccaggaacggcatcaataattggcctttgagcagcgggtcgggtgagtgccactggatgtcgaagaattcgctgtaggggctcaggcgcccccattccagcaggtccagccaccaagggttgtcggcgccgcccacggccatgtggttggacacaatgtcgaggatcaagcccatctcatgctcacgcagtgccgccaccaggcgccgcaaggcgggttcgccgccaagctcggggttcaccgtggtcgggtcaaccacatcgtagccatgcatggaaccggcgcgggcgctgagcaagggcgaggcataaatatggctgatgccaagcctggcgaaatacggcaccaacggcaccgcgtcatccagggtaaagcctttatgaaattgcaggcgctgggtggcgcgtaacgcaaggggcttcatcggtcacgctcgtgggcctggttgcgcgctacggcgagcagttcgaggcggcgtgcggcgctttcattgtcgagcaggctggcggcttcaccggtgaaacggcggcgccagtttgggtgcgtatcaagggtgccgggcaggttggcctgttcttccacgcccagggcatcttccagtggcagcaacaccagcggcgcgcgggtgtggccgaggtagcgcacgctggcgtcgatcatgtggtcggtgtcattgcggatctcgtcgacaaagttctgcgggtcttggctcaaggcctggcgcaacgcctggcgttcgcgcaggcggtgctcgctccattgctccacggtgggggcatcgatcaggccgagctggatgttccactcgatatcccggctatgccaccagccattgagcgtgggcaaatcgtgggtgctggtggtggccagggcgttgtccggccagtcgaggatcggcttgaactggccgtcgtggttttgttcgaacagcagcacacgcatgccgaggatcgagcgggcgatgagtttttcgcgcaggccatccggtacggtgccgaggtcttcgccgagcacaatggcttgatggcgatgggactccagcgccagcaggcgcaacaggtcatccaccgggtaatacaggtaagccccctcacgcggcgacgcgtccatggggatgacccacagacgctgcaggcccatcacatggtcgatgcgcaggccaccggcgtgggcgaagttggcgcgcagcatctcgataaaggcacgaaagccgttgcgcttcaggccttccggcgagaatgcagatatgccccagccctggcccgcacggttgaggatgtcgggtggcgcgccgacggtaaggtcggcgagcaattcatcctgacggctccaggcctggctgccaccgccgtcggcgcccacggcgaggtcggcgatcaggcccacacccatgccgctgccgcgcgccgcttgctgtgcgcgttgcaggctgcgggcgatcagccattggctgaaggcgaaaaaaccgatctcgtcgcgatgttcttcggcgaactgtgccagcgccgggctttgcgggttgcgccacgcctcgggccaatggcgccagtcgaggtcttcgcctgcggctgcgcgcagcgtttgcacggcctcgaaccggcagtggttttccagggcttcacccccggcctggcggaaactcaaaaagtccgcgtgctgcgggtgcccgccctggcggaagtcttcatacagtgcgcgcagcaggcgttgtttggccttggcggcagcgggccagtcgatcaggggcagttgttccagtgtatgcagttcatcttccaggcctgtcgcttcaatggcgctgcgcacgtcacgttcgccaaggatgcacgtcggcgaggcatacaggctgttgaggaacaagcggctggacggcgagtaagggctatagcgcgaggggtcggcgctgaacatcgcgtgcatcgggctgatggccagggcatcggcgccgcgctcggcagcggagcgcgccatatgttccagtgccagggtgtcaccaaaaccgccgtcgcccaggcggcgcaaagcatacagttgtgcgctcaaaccccaggcgcgggcagggcggctgtccaccgcttcggccacgctgtagcagtgagccggcgccacggccagggtgaacgtctgatcggcgatatgcacctggtgatagccgagggcaatgatgcctggcagcacgccatcaccgtcgaggcgtaactccagggtttcaccgccttccaggctgacccggcactgcgtgtcgggctcgaagtagcgggccaggtcaaggcctgcgccgctgtcggccgtcagcagcggcggcaggtgtttgtcttgttgcacctgctccagttccagcaggctggcgtcgatctcggcatcggtatcggccgggtggcccaggcctttgaggacggcgcgcagggcgtcgggtttcacatgttgcgggcggccgtttgcgtcgatccaatcgacggccaggcccgcgcggctggcgagtatttccaggttcgcttcgctcaagagtgctctccaacaggggatagggcgacgcgtgcgctgaatggcgccagttgcgcctcgcttgcggcaggcgtctcgaatagcagatggggcggtgcggggtgatccagcgccttggcgccaaggttcaggtcgatctgcagcacgctgccattgcccaggcgccagcgtgcgctgacggcgccgtctgccagcacttgcgcacccaaggccacgctgcccggtaaatgcggcacgatgtggcggtggcgcaggctcaacagcttgcgatagaactgcgcctgttcgttttcagtgaaggcgggtgccgattgcagaaaggtcggcagcgcattggggtcgggaatacgttcgcgccgctgcgggtcctggaaggcggcgaagtcggcaaattcgttgcgtcggccttcgcgcacggcttgggcgagttcgccgtggtggtcggtaaaaaacaggaagggttcgggcgcattgagctcatcgcccatgaacatcaagggaatcatcggtgacagcagcaataacgtggtggccgctttcagggcttgaggcgggcaaagttgatgcaggcgctcgccaaaggcgcggttgccgatctggtcatggttttgcaggaacaacacgaacgcgctcggtggcaaatgcccgctgggctcgccccgggtgtggccgtggcgggtggtgtcgccttggtagataaagccttcgcccaggcaacgtgccagcttggccgtggtgtcctcggcaaagtcactgtaataggcttcggtttcgccggtcagcagcacgtgcagggcgttgtggccgtcatcgttccattgcgcgtcgaagtcgtgttccagcaggttggcctggttgaattcgttttccagtaccagccacacatgccggccgatatcggcttgctggcgcactcgctgtgccaactctttgaggaagcccgggttgtcgatggcgtgcacggcgtccaggcgcaggccgtcaaaacggtattcgagcagccacatcagtgcgttatcgaggaaaaaatcgcgcacttcgcggcggtcaaaatcaatccccgcgccccacggcgtgtgcacgtcttcgcgaaaaaagcttttggcgtagtgccccaggtaattgccgtcggggccgaagtggttgtaaaccacgtcgagaatcaccgccaggccgtgttcatgggcgctgtcgatcaattgcttgagttgttcgggcgtgccgtaggacgcttggggcgcatagggcaataccccgtcgtaaccccaattgcgctcgccgggaaattgcgccagaggcatcagttcaatggcggtgacgcccagttccgccaggcgcggcagttgggcttcgacggcggcgtagccccccagcgcgcccacgtgcagctcataaatcaccgcctcgtgccacgggcggccctgccagtggctgtgtcgccactgataggcgagggggtcgacgaccaggctccagccctgaatatcccgggcctgagccctggacgccgggtccggcacgtccagttcgccatcgatgttgtagcggtaatgcgtacccgccgagcacgtgatctcgacttcgaaccagccgtctgcctggggcagcatggcgatggacttgccgcattgcaattcaacgctgacataaaacgcatcgggcgcccacaacgcgaaacgcgtgtgttgcgcgtccagtatgattgcgccgtggggccaggtttccagagtccgtgacggcatctatgaagccctcccttgattatttagcggttttccccagggcttttgccaccagttgttcatacagttcggcgtagggttccaccgcctggcaccagttgaagggttgggtcatggcgcggctgcgcatggcgttgagcaggcccgggttggcgaacacccggaaggcgcggctcagcgcttcctcgtagctttcgacggtggattcattgaacagaaagccggtgacgccgttttcaatggtgtcggccaggccgccggtattgcgcgccaccggcaacgaaccgaaacgctgcgcgtacatctggctcaagccgcaaggctcatagcgcgatggcatcaacaggaagtcgctgccggcgaacatgcggcgggcatccgtctcattaaagccaatgcgcacaccgacctggcccgggaaacgcaacgccagctcacgcatggcctgttcttcctcaggctcgccacgaccaatgattgcgatctgcccgccgttttcgacgataaaactggcaaccgcttcggtcaggtccaggcctttttggtagaccagacgcgataccacggcaaacagcgggccggtggaggcgtgcagcccaaacagctcacgcacgtgatcggcgttgacggccttgccttcccagtcgccgatgttgaaattgtgggtcaggtgcgtgtcggtggaagtttcccagctttcatcgataccgttgggaatgccactgagcaggccttgctgggttttgctggccaggaaaccatcaaggccgcagccgaattccggggtggtgatttcctgggcgtaggtcgcgctcacggtggtgatatggctggaatacgccatgccggccttgagaaacgacatcttgccgtagaactccatgccttcctgttgcagggcgtggggcgggatgcccaactccggcgtggaggccaggctgaccacgccttgataggcgaggttatggatagtgaacagggtgggcgtgcgtgacccgcgccagtgcatatacgccggggccaggccagcgggccagtcgtgggcgtgcaccaggtccgggcaccagtggatttgcgcaaggttggcggccatgtcggcagccgccaggccgaggcgggcgaagcggatatggttgtccggccagtcgcggccgttgttggcgccgtagggcgtgccttcgcgctcgtagagttcagggcagatcagcacatagatgaccaggccgtccttgaggtccatgcgcccgatcttgcacggcggcagcgcggcgtggccacccagctcaccgatgatatggatcgggttgtcgctttccattacctgcggatagcccgggatcagcacgcgcacgtcatgcaggtgcgccatggcacggggcagggcagcggagacgtcgcccaggccgccggttttcaccaggtcggcgaactcggaggtgacaaacagcactttcttgcgattagggttctgactcacgatcggccgcacagtgttgggcaggtcggccaaggaagtaggcccccctaccgactgactgacacgctctccctgagaatctaaagcggcactgatcataatgcactcccgtatttttggtgggctaatggcccgctgccattagctccgatgaccgcatcctgcggccagacgcacaagcgctatcacaagctggcaaggcgtatgccagttgcacgcaaagcggaaaaagattggatggacggcattttgacgtcaacgacgtgtgcacgccctacctgaaactggacctacggcagagttggaaagtttcgattttttgcggggtttttgttttggaacggacccatcggtcatgagtctaggacagatcctagagcctgctgggtttctgagtgatttttgtaggacaaaatacttgtaacaagagtcaagctggttattagcacggacgatgacgatcttgccggtgcatcgaaacaacccattcgggagtgcttcgcactccaacgcagggcaagcctgctcaccacagagatagcactcacctctacagtgcggtttgccctgcgttggtgcgtcagccgagcacgcgaatggccgccttattcgcccacgcttgaatgtcttcgatcatctgctgatagaactgccggtaattctgctcgctgacataacccacgtgcggagtggccagcacattgggcaggcggcggaacgggtggtccaccggcagcggctcttgggcatacacgtccagtgctgcacctgccagccgcccagcggacagcgcctccaccaacgcctgctcatccacgatcggcccgcgtgccgtgttcacaagacgcgctgtcggcttcatccagctcagtgcctgggcatccacaaggccgcggctgcgatcgctgagtaccaggtgaatggtcagaatgtcggcctgttcaaacagggccttcttgctgacccacgtcacccccgactcggccgcacgctcaggcgtcaggttttcactccaggcaatcacgcgcatgccgaacacttgggcaaactgcgcaaccttctggccaatgctgcccagcccgaggatgccgagggtcttgccatacagatcaccgcccaggcccacctgccaatcaccggcgcgcagggaattggcttcagccagcaggttgcgggtcgaggccatgatcagcgcccaggtcaattcgggggctgcctgtttatagctgtcggtgccgcacacctgaatgcccagcgccttggcggcggcgatgtcgacggctgcattgcgcatgccgccggtcaccagcagtttcaggtttggcagggcctggagcaggggcttgtcgaaggtcgagcgctcgcgcatcacgcaaatcacgtcgaacccctgcagtcgctcggccatcgtggcggtatccgccgggtaatcgtgaagaaaatgcacctggccatcgggcgccaggaccgaccagtccacgacgccacgggctacattctgccaatcatcaatgactgcgatctgtatcgacattcacgcgtgcctcgaaaaaggttggattaaagggcattcaaaccctgcaacagcgcctgatgaaaccgggccggttcttccatctgcggcgcatgccccaggcccgggaatttcaccagggtggcatgggggatcagtttggcgacttgcttgcccagtacgtcgtagtgaccgagcctggccttgaccgcaggcggtgcgatatcgctgccgatggcggtggtgtcggacgtgccgatcaatagcagcgtgggcatctgcaagtccttgaactcgtaatacaccggctgggtgaagatcatgtcgtaaatcaaggccgagttccatgcgacttgggtatgccccgggcctttgttcaggccggcgagcatgtcgacccagcggtcgtactcaggcttccagcggcccacgtaataagtgttgagttcatactggcgaataccttcggcgctgagcttgagctcgcgctcataccattggtcaacgctgcgatagggcacgcccagcgctttccagtcttccaggccgatagggttgaccagcgccagttgctcggtttgcgcggggtacagcagcgcataacgtgtcgcgagcatgccgccggtagagtggccgacgatcgtggctttttgaatgccgagtttttccagcaattgatgggtgttgagcgccagttgctggaagctgtactggtagtgctcgggcttgctggacgtgcagaagccgacctggtccggcgcgatcacccggtaaccggcgtcgctcagggttttgattgaggcctcccaggtcgcaccgcagaaattcttgccatgcatcaacaccacgctgcgcccgttggctttgccgctggccgggacgtccatgtagcccatttgcaacgatttgccttgggactggaaattgaaatgctcgacggggtaggggtatttgaagccttgcagctcagggccataggtggcggctaacacaggcgtggcgctggcggtcagcaggccggcgacgcaaaaagcgcggaatagaggcataaaagggctccaaaagggatgcccggatgctgttgcgaggggattaagtggggattaacacccactgcagggtcagggctgccagcacgccgtatcgcaaggctttggcgaaggtgaccagcagcagaaagcgccagagcggttcacgcatgacgcctgcgaccagggtcagcggatcaccgatgatcggcacccaactgagcaacaacgtccaatgcccccagcgctcgtaatgcctgcgtgccttgtcgagttggttggcgctgaccggaaaccagcgtcgctccttgaagtgctcaacccagcgccccagccaccaattcaccagtgaccccagcacgtttcccagggtggccacgcccagcagcaaccacaggctgtagtgcccgctgagcaaaagcccgacaagcacggcttccgactgcaacggcaacagggtcgcggcgccaaatgcggcggcgaacagcccgaggtaacccgccagcatatcttcagtgcgccgggtagtcggccaccaccacgtctttaccgtcacgtgtcaggccgatcacctggtaggcatcgctgcgtccttccacttccatgccaggcgagcccagtggcatgcccggtgcggcaataccgatcaaatcgtcgcgcttgcgcagtgccaacacttgctcggcgggtacgtggccttcgacgaatttgccgtcgatcacggcggtatggcacgagcccaggcgtggcgcgacgccgaggcgctgcttgaccgcgctcatgtcggcttccacgtggtcattgaccttgaagccgttgctttgcaggtggctgatccattttttgcagcagccacagttggcgtcgcggtgcacgtcgatggggatcaggtcggcggcctgggccagggtggtggtgaggagggcggttagcagggccagtcgcaatggggttttcatgggaaggggctcgcgagttggaagagggcgcgatcatgacggcctcatcgcaggcaagccagctcccacagggggagaggtgtgacaggaatgtttcaagattatacgaagggagtgttttccaggcggtgtttgagctggtccagggcgatggcggacaactcgaccatgcgcacgtgcaaggtcgccagttgcagctcggtttcgtagatcagcacgcgtttgaacagcgtgccgccacgatggggctgcaggaagtaatggatggagccatccacggccagggaggtgaacacggttttgaattcttgcgcaggcttggcgacctgcacccggtaactcatgggtacgcgcacgccgagcaggtcgatgacttcggtaaagcgcgcgcctgccgacagtgaaccggtggtgcccgtgtcagcgctgagggaggtggggtgccattcgtgccagcgatcgggctgggtcacgtaatcgtagaccacctcgatgggggcttcgataaagcgttcctggcagatccgttccaagcggacttgatgctcgacagcgtgcatgacacacctcctgtgtagcgagatatcatccagtgaactgtcagaatagtcccactcccgcgcattgcacgggagtgtttcagtaatttatcactgcaccttgaaacggctcatcagcgtgatcacccggccgttggcgtccagcaggttgcgcgtgttggtttcagtcgcgtggccgctttccaccaactcctcaaccatgtgccggatttgcaccatgctgcggttgatctcctcggtcaccgcgctttgttgctcggcggcggtggcgatctgggtgctgaggttgttgatatggctgacggagccggccatctcgtccaggcccgtattcacccgcgccgtggcgtcggccgccgattggcaactggcctgggtgttttccatggccgcgaccgacgaactcacgccggtggtcaggcgcgcgagcatctcgttgatctgtgaggtgctggcctgggtgcgggcagccagtgcacgcacctcatccgccaccaccgcaaacccgcggccttgctcacccgcgcgggcggcttcgatcgccgcgttgagcgccaacaggttggtctggccggcaatcgcaccgatcacaccgagggtttcggtgatgcgtgctgcatcctggcgcatcgcttccacggtgtgggtggcgctggacacctcaccaatcaacgcgctgacgctggtcgacgcttcacccaccaccacccgggagcgatcggcgtgctcgttggcgcgctgggtaaacgcggccgtttcagcggcattttgcgcgacggtgtcggcggtagagctcatttcggtgatggcggtcaccgtttggtcggtttccgaggcatgccgcaccagaatctggttggtgtgcgccgaggtctgctgcagttgcgcaaggccggaagacatggcccccgtggcctgggtcacttcgccgatcaggttttgcaggtagacgataaaacggttcaccgagtggccgatggcgcccaattcgtcttcggcacgaatggtaatgcgccgcgtcaggtcggcgtcgcccgcagacagcgcgtcgatattggtcttcagcgacttcatgcgctgcaccagttggcggatggcataggccgcgagcagcaccagcagcagcaccatcggaatttgcagcagggccagggtgccgagcacgtcatcacgctgggcggtgatcagtgaggtgggcagggcggtggcgaggaaccacggcgtaccttcgatagggcgcaggtagaacgtgctggccacgccgccgttgtcgaattcgctgcgttgcaatccttggtcgcggtgggccagggctttgctgacctgggcggcaaacgccgaggtgccggccagttcgctgatgttcttgagcaccaccggcccactgatgcgggagctgttgctgatgattttgccgtcgccttcgacgatcagcatttgcccgccgatgtctttctctttgctggccactaggtcgttgaagaagcccagggtcacgtcgatggtggaaacgccgtaggccgcgccgtcacgctggatcgccatggcgcagttggtgcgcggctcctggctggcatcgtccttgtaggccgcggcccaggcacattggccgcgcggcgaggccaggccgcccttgtaccaactctgatcgtagtagttcggcgcggcgtcgctgttccagaaggtgttgaccgccagcttgcccgaggcatcacggtgccagaaggtgctgtgcttgttgcgaccgggcgtgcgctggttgggcaacggccagatgccaccgccaaacactttcagctcgccgtattggtcgaccaggccaggcaggaccttgtcgatggcatcgctgtcgagcaggggaatggtttgggtgatgctgcgttgctgggcctggaccttgttcagttcgcccttgatccgctcggctacttcggcgacgcggttgagcaccacctgttcttctgtgtggcgcaacgtgggcgcgaccagttggccaatgcccacgacggtcagcacgagtaaaaccaggacgaacagcaccagaaacagggtgtagcgggcttggatggagcgcagtgggggcatggggggtcgtccttacgaagcgtttattatgaacgcggctttgttggagcttcgtagggctatcggcgcagggagaaagagctttaggtaccatcgtgcaagaaagtgggagcgccgtgtggcggcgctcccgatgtgaaaaccgtcagatgcccagcatcgtcatcaccgcctcggggtagcgcaaacctgcggtcgcgtcggtggggaaaatggcgtcgagtgccgtccgttcggtcgcgttaagcgttacggaaaccgccgccacattttgttccaggtatttgcgctgtttggtcccgggaatcgggatgatgaaatccccttgagccagcacccaggccagcgccagttggccggcggtgacgcctttgcctgccgccagcgcctgcacctgttccaccagccgcaggtttttcgcaaagttttcgctctgaaagcgtgggctggagcggcggtagtcatcggcgtcgaagtcgtccgggcttttcaacgcgccggtcagaaaaccacggcccagtgggctgtagggcacaaaggcaattcccaggcgttggcaggcggcgaggcaaccgttgtcttcctggtcgcggctccagagcgagtattcactttgcaacgcgctgatggggtgcaccttgtgcgcgcgctccagtgtggcggcggacgcttcgctcaagcccagatagcgcaccttgccttgtttgaccaattcggccatggcgccgacggtttcttcgatgggcacctgtgggtcgatgcggtgctggtaatacaggtccagggtttccacgccaaggcgttttagggtgccattgattgcgtcgcggatgtactccgggcggccattcacgcctcgcagtgaggggttggccgggtcgcgcaggatgccgaacttgctggccaggaagacttggtcacgtttgcccgcaatggccttgccgatcaatgtctcattggtgtgggggccatagatatcggcggtgtcgagaaagttgacacccagttcgagtgcacggtgcaacgtggcagtggcttctgcggtgccggtggcaccggtatagaaatccgacatgcccatgcagccgaggccgatggcgctgacaagagggccgtttttgccgagtggacgggtttgcatgggttcagctcctgaggggttggaaggcctccattgttatcctcgacaaaagctggataaaccggctaaaaacactatcactgttcgtaatatctaaataattcgtgtgggagccgctcttggaccgtttcaatgcgatgcgtgtgtttacccggattgtcgaattgggcgggttcgccaaagcggccgacagcctgcagttgccgagggcgtcggtgaccatcctgatcaaacaactggaagcccacctcggcgtgcagctgctgcagcgcacgacgcgtcaggtcagcccaacgctggacggcgcggcgtactaccagcgttgcgtccagttgctgacggatctggaggaaaccgaagcggtattttccgccagccgccagaatccgcgcggcaccttgagcatcgacatgcccacggggatcggccggctgatcgtgattccggcactgccggcgttcacggcgcgctacccgcagattgaactggagatcggcctcaatgaccgtacggtagatctcattcgcgagggtgtggactgcgtgctgcgcggtgggctcgcgctggacgaatccttggttgcacggccgttggcgatgatggatcaactgaccctggccagccccggttaccttgaacgctttggcacgcccagcgtattggacgatctggcggggcatcgcatggtcgaatacgtttccagcgtcagcggcaaacgctttggcctggagttccatgacgctggcgggctgcgtgaggtcaacttgcccaagacggtggcggtcaacagttccgaggggtatttcgcggcgtgcgaggccggtttcgggttgattcaggcaccgtattaccacgcccggcgccaactggcgcagggcaccctgatggaagtactgccccggcatgcaccgccaaccatggcattgaccgcgctgtacccgccccatcgtcagttatcacaacgggtcagggttttcatcgattggctggtcgaactctgcgccacgccaggcactggcctgcagcgctaagcctgggctttgcgataggcccccggttgttgcccggtcaccttatgaaacgcgcgggtaaacgcggccaccgactgataacccaccgccagcgcaacatccgccacggtctggtcgttcttgaacagcttgcaagcgtggcggacacgcatcatcagcagcacttgccccggcgattggccgcacagctcattgaagcgcttgaaaaatgccgagcgtgacaacccggtacaggcggccatgctctccagcgtccagggctctgccgggcgcgcgatcaactgttccaggagcttggcgaacgccggttgccggcccagcgcagcaaggccgccaaggtctgcattgtcgagcacctgctggcgcaacacatacagaaacagcaaatggcaaagacgttcgagcaaggctggggagggcgcgggggtgcgttcgcattcctgcaggatcagctcaaacaggttacgcgcagcggccagtgacgggtcgccggcgcgcaggatgatccaggcgggcagggtgtcgacaatcattgccgacaacccggactggaaatggaagaaaccgcagaccaggcccacgccatcgtttgcggtggtatccagtgccagcatcgggcggcgcgggcattcccgggcacctgctgccgtgggttcgccagacagccggtacgccaagtcacgcaacagaaacaccgcgtcaccattgttcaggtgctgcggggtcgattcgccgtcgatatgcagccagcattcgccctgcacgatcaggtgaaaactcgcactggccagaccgtgggtgctcgcatgccagtcgccgcaatagcggcccacatggaacaggctggtgttgagttcaaggctgtctaataaccaatcgacaagtgcactggacgaattcatctaatggaaagactcaagagcaagtaatcgctactttagcctattgaggcgtttttttataaccaacagactggatgcacgaacccatcaggagaccactccatgtcccgtgtaccgttgctcacccctgaaaccgcgcccgcagcggccaagcccttcctcgaaaacgccttgaagggctcgggtttcattcccaacctgctcgccgtgctggcgaatgctccggctgcgctggaaacctacatcaccgtttcgggcctcaatggcaaatccgacctgagcttggctgaccgcgaagtggtgcaactgattgccgccaccacccacggttgcgacttctgtgtcgccggccacacggccgtggcgcgcaacaaggccaagctgcccgaagaagtcattgacgctttgcgccagcgcggcgaattgccgaacgcgcgctatgagacactcgccgccttcacgcgcgaagtgatcgccacgcgtggggacgtcagcgacgcaggtttcgaggcatttcgcgccgccggctacaccgacggccacgcactggaagttattttgggcgtgagcctggcaaccctgtgtaacttcgctaacgtgtttgcccgtacaccgttgaacccggagttggcgcaataccgttgggaaaaaccggcaagctgaacgggcgttggctcaactgcggtaaaaggagaaatatcaatgcttgacccaatcttgagccgttggctcgatgttcaagcgcaggccctggatgtgggcagttgcgatccacaggaagtgctgccgaggctggcagaaggcaacgtattgcgcatcggtgtgccgaaacacctcggcggcctgggcggtgatgtgaccggcgcggtggacgccatcgccaacgtcgccagccattccctggcggccgccttcgtgtgctggggccagcgctcgtttattgaatacctgttgcaaagcccgaatgagcggctgcgcgagcacctgttgccggatttgctcagcggcaagctggcgggagcgaccgggctgtcgaatgcgatgaaatttctgtcgggcatcgagacgctgcagatcagcgccgaaccgaccgccgatggctggacacttaacggtcgcctgcattgggtgaccaacctgcgcaagaacgggtttgtcgcggcggcggccattgagcatgccgccggtggcgcaccgtttattctggcgatcccggactcggtagccggcctgcaacgctcacgcgatctggaactgctggggctgcaatcgagcaacacggcggcgctcggcctggaaggcgtggaactgagccgcgactggctgctgcatgaggatgcgcgcaagtttttgccggccgtgcgcccggcgtttttgggtttgcagtgtggcatgtcgataggcttggcgcggcgttcgctggccgaagtcgccaatcatctgggcgcgagccgcacggttttgcgtgaagagttggaagcgttgcgggcgacactggatcacttggtgaccgagctcaaaaaaggtctgctggccgggcgttttgcctcagaaccggtgcccttgttcaagctgcggattgccctggcggagaccgccgccagtgccgtgcagcttgagctgcaagccagcggcggcaaagcgtacctcacggcccacggcagcggtttcgcccggcgctggcgagaatccgcattcgtgcccatcgtgacgccgagcctggtgcaactgcgtaccgaactgcaacgtcaggccagcctatgagcctggcggtattgagcgcccaggggatttgcctggggtatgccagtggcccggtgctgcaggggtttgatttgcaattgcagcctggcgaagtggtgtcgatccttggccccagcggcgtcggcaagtccagcttgttgcgcgtgctggccggtctgcaggcgccccagggtggcagcgtgcaggtgctcggcgaagcgctgaacggcccgcaccctcgggtggcggtggcgtttcaggaccctagcctgttgccttggctgagccttgaaaagaacgttgcctttggcctggatttcgcccgtcagccgcatttgagccacgacgaacggcgccgtcgcgtggaccacgccattgccgccgtcggcctggagcacgcccggcaacaattcccggcgcaactctcgggcggcatggcccagcgcaccgcattggcccgctgcctggcgcgccagccgcaagtgctgttgctggatgaacccttcggcgcgctggatgaagtgacccgcgccgatatgcagcacctgctgctcaaggtcaaccgcgagattggctcggcggccgtgctgattacccacgacattgatgaagcgttgctgctctccgaccggattctgctactgggcaaccgcccggcgcgcacgttgggcgaatggcacatcgacctgccgcaaccgcgcgaggaacaggtcgaggccatcggcgccttgcgcatcgagattctcaaaaccttacggcaggcgagccgccctcaacccaacccccttcaattgctggagcccagccatgtgcctggatgacctgacccactcgcgccgtgactttctcaaactctcggcggtgctcagcgccgccggtgcgttaccgctgttgagcagcctgcaggcccgcgctgccagcgagccggacgcgccggtgcgcatcggctacctgccgatcaccgacgccacgccactgctggttgcccataacaatggcctattcgaagccgaaggcatcaaggccgaacgcccggtgctgctgcgcagctgggcgcaagtgatcgaggcgtttatctcggggcaggtcaacgtgattcacctgctgtcgccgatgaccgtatgggcgcgctacggcagcaaggtgccggccaaggtggtggcctggaaccatgtgggggggtcgggcctgacagtggcgccgggtattaccgatgtgaaacagctgggcggcaagtcggtggcgattccgttctggtactcgatccacaatgtggtggtgcagcaattgttccgtgacaacggcctgacgccggttgcgcgggctgccggcagcgccattgcggccaacgaggtcaacctgatcgtgctgccgccgtcggacatgccgccggcactggcaagcaaacgtatcgacggttacatcgtcgccgagccgttcaatgccctggcagaaaacctcaaggtcggtcgcgtgcagcgctttactggcgacgtgtggcgcaaccacgcgtgctgcgtagtgttcatgcacgaacacgacctgaccaaccgcccggagtggtcgcagaaggtggtgaatgccatcgtcaaggcccaggtgtggacccgtgacaaccgcgaagaggccgtgaagttgctgtccaaggacggcccgaaccgttacacgccgcatgccgaaccggtactgagcaaagtgctggccccggccgctgccgaccgtgctgcgtacctggccgacggcgcgattcaacacgccaactgggacgaacatcgcatcgacttccagccttatccattccccagctacaccgaggaactggtgcggcgcttgaaggacaccctgatcgaaggcgacaagaaattcctcgccgacctcgacccggccttcgtcgccaaggacctggtcgacgatcgctttgtgcgtaatgccatcgaagccgtcggcggcatgaagacctttggcttgcctgacggctatgagcggcacgaggagattggcgtttgaacacaggcaaaaccgttttatggccaggctggttgctgggtatcagcggcttggctggcttgctggtgctgtggtggctgggcgtgaaggtgtttggcgatgccaacggtttgtcggcgcgtttttcgctcggcgccaccttcagcagcctgtgggagttgctggggcgtggcgagctgtacctgcacattgccgtgagcctcaagcgcattttcgtcggcttgttcctcgcactgctggtgggtgtgccactgggcttgctggtgggcagctcgcgtaacctggaagcggcaaccacgccggcgtttcagtttttacggatgatctcgcccctgtcgtggatgcccatcgtggtaatgctgatgggcgtcggcgaccaacctatctacttcctgctggcctttgccgccgtgtggccgatcatgctcaataccgccgccggcgtccgtcagttggaccctcgctggttgcaactgagcaaaagcctgagcgctacgcgttgggaaaccttacgccgggtaatcattcccggtgtggtcgggcatgtgctgacgggcgtacgcttggccatcgggattttgtggatcgtgctggtgccgtgcgagatgctcggggtgagtgcggggttgggttattacattctcgacacccgtgaccggctggcctattcggaattgatggcgatggtcttgctgatcggcttgctggggtttgcactggatgcgtttgcaagggcagtgcatcgaaggtgggagcacgccgggtaaacgctgatcccgagcaatgctgcggcatcgctcggggtttcagggcggggctaggcaagaatatgcaggtcgccagcgatctggcctggcagtatgggcttgtccgggtcggcgaggttggttttgaatttcacgccaaacgagggggcgagggttttcaggttgtaaaccccaacgccgatcgctccggtctgttccgccaatcctggaatgccttcagaggtattcatgtgacttctgccgaccagggccacccatttatcggtgcccgaatcagcctggatcactttcgaggcatagtagttgaactctttgaggcgccgctcggatcctttgccggtgatggctcttggcaaattttcgcctttgtgccgcgtcagatagtagtgatcaagcggtaccacctcgatgccattttgtttgagcttggtgatgagttcagcgtaggtcgggttggttcgaggttgctggctgtttccgagaaggcccaggccatcatcgaccgggccgtggccggggaagtcaatcacgccctccaggtacacctttttcacgccctgctgtttcaataattcagctttttcgaacagcagcctgaagctggccatttcagaatgggattcaccgaaaatgatgccggaggacgttttcagcgcatcttcgatcagtttttccgaggtcacggtgccggggtattcaggcagcgccggccgcgaaggcaggctttttaggtgtttcgagatttcatcgtagtgcgtgttcatttcgttctgaaatttctgcacggtctgtttttttgtatcctcgtagacgaagtgcgcccatttcagtttgccttttgtgctctccacgtaattgccctcaggcaatggctccatggtcgacgtagaggaggtgccctgacggtagggaagggggcgtgtgccgcccgggttgagtgccttgggcatgagggtgtcctggggggaaaacccctcaagcggcgggccatagggctgtagcgtggccttgtcgatggcataccatttgccgtcctgttgcaccgcacccacttccaggcgttttccactgtgctggaagacgccaacggcagccgcgtcaaactcgctgcccgccttgatcagatcgctgcctttgaacgccccccgaagcctttgcacgccttcgttggtggcttcggcgcctgccagcacgagtttaccggcgcccacggccaggtcgcctgcaccgcctaatgggttaagagcgctcaacgtgtcagcccctattacccgggaagcacgcagcaccttacccagcgttgtgccggttttgcctgccccctttgccagttttgccgccgtgcccacgcccgccgtcagcagcccgaacacatcaaatgccaggtctgtggcggcgtctttgtagttgccgttactcaagttcacgatggcagacctgaggggaataaggtcgagtaaaaactcgcctattgaactcagcgtatctctgcgttcctcagaggatgtgcggccttcggcttgacgtctcacggcggcactgtcgatcgccaggcccttgaccacggtggcggctatgtcctgaatacgcgggttctgaaagagattgggcctgcgataaatcgttcgatactctttcaaggcatgggcgttgttgtccgggaaaaattcctcgacttttgtgacctcgttggaaatatattccggctcgcggtcggcggggtgagtcaggattttccgtacggagccctttacggtatcgaaggcgtacgattgtgttttcccgtcgtgttcggcttgcaccagtagggtggagctggaatggaacaggctgtcgctgacaaagggaataagtgaggttttatacgagttttccttgaagaacctgagcttgccgtagttgagttgcgtgcggtcctccagcggcaactgggtgatggcattcatcatcaggtcttgcttgatgcttttataatgggcagtgacctcattgaacgctttgtcgaatgcggcaggaatgttgaattcgctgctgtgggtgaacgccgcaaacttcggcaggtcgatgttgctggccccatgcacctgccagctgtcatccagcttccgcccttgcatggtgatttccagcggggagtaggggtcactgaaacgcagccccttgatgtccgtaccgtagttgatgcgcagggctttgtgttcgaagtcgataccgtcgccgaacttttccttcagcagcgccaatgccattgctttgcggtcgggcatgggggtttcaagtgttgaagacgcggctttaagatcactctgctgcctgttgaatgcggctcgcgcggcttcgatttcatagccagggtaggcctcgtccacgcgtttatcgataacctgattggcaatcgcccagtcgatcaatatcgccttttgattcgtctcgctggctgccggcaggtcttcggcagccagcattacctcgctgaaacgcatccgtgcggtcttgccgggcgtttgctcttcaatgcctgccacggccaggcaaaggttggcccacgccacgctgcccactcgcacgcctgcgggaatatccggggtcaaatactgtggggcaacgtgtgccaataacagacgggcgcccagttctgccgtgcttctggaggtctttccagtgttgaacaggtgctctgtgagggcactgactacctcggcaggtgacttgccaaactgcgtaagaggcgccaggtcgaaacctgcgacgtggttgcgggtggctgagtcgatagactcggggtcaagccccaggtggatggcggccagcacgtagtcgttgacactgtgtgctgtggggatgccgccgaccttcaactgcaccgcttcgccgagcgcttgggcccggggtgaatcgagcagtttctccatggcttttgccgggtcctgcaagtcggttggggagaacgattgcgcctcggccaaataatccaatgccccccggcgcgcgtgctgttgtggcaggccttcgagcagggcgctgttgcaagcaaccacgttgaacacgtcgcgttggagcttcacatccaggggcactgaccaggccagggcgcctgcgaagttgcccagcggatgcgtcaatgtgtgttcgcagagtgcgttggccaatgttttcagggcagcaatcgaaaccggtggtgtaatgccctgatccttgatgaacgcttcaaggctgaccgtcgccggtttcaacgtgcctgcgggcataaacgtcgattcagaagcgatcggcatctggtgttgttgcagcttgccggcaaccgcttgtgcgtcggcatcatcgggcagttctgcaatgagggtggtcagcccttttgccaggctttccaggttgtgtcgatcgccaagggcggccttgagcgcttggcggccatccggtagcggggccatgcgggttactgcgggcgcaggtgcttgctctaaaggcgatagggcagtggctggaatgagcgatgggacgaaaaccgcgggctgttggagatgggttgtaatggtcatgatttgcctgattgaaagtgcacgagtgagcgcaggcaaagcaatacggcgatgccttaaagcgcactgctgggtgtacgaatcagcgaaggccgttcctgtcaggcaagcagaccaagtgtaagaaaaaatctgcaggtgtatccggcggcctcagcgccgcgcaattaaaagcggggtttgcgcggaggccggtggttcgatcccgcgttgggcaagccaaaaccgatcatcgcctgtaacataagcgcgggctgccacaggcttttgtctacagcaggtggtaatgcaacgcgaaaacatttttcagattcaggaaaccgtcatgacccaaaagcaacgtttgaaatattcgattctgattgccctggccgtactggcgacgatgtttggcctgtcctatctgcagaacactggggttatcagcgagaaaacgttccagtacatcgccattgccgtggcggtgaccgtggtagtgatcaacggcatcatgcgccgtaaggtcaagccgaacttctgactcaacccgggggctcaggcgcgaccgtcgagcaccttggcagcctcttcatggaggctgtagcttttatcggcattgagggtgatcacaccctcgctgcacaggcgcttgagcacttcacgcacgctgagaaacgacagcggaatacccagctcgagcaagtggctgtgcacgccgcgcacgccgagggagcgccggttctcggcggcggtgagcagggcgtcgatcaccttcagccgaatcaggctggtgcgcaggccgaaacacttgagtaagtggcgaatgcgctggttgccttgctgttcgggcgctttaccgaacgcttgtgtgccgccgccgaaactggcgtcggcagccggtgaatgtccatccgtgggcacttgcgggttgtacatgcaaaaaactccttatcagagcctgatcaggaaaatgatggcgctcttagttaataagacgaacgagcgagcaaaatcatgaagtgccggatgtagaaattttgtcggtatcggctttgtcacatccccctcgcctgaaccaaacgtgctgcacgcctaaattattcccggttgtttgcgtccttacggtggggtagctgccccttgtgagggtgttcaatttgactgtggagcttgcgtgattattaccaacgggttgtccagagcatgtgtagccggggtgatgctgggcttgagcctcgctgcctcggcacgggaaccggcaacacaggcatcggcagaaattcggcgcaccacgtttggcgtgccgcatatccgtgccagcgatgagcgtggccttgggtacggcatcggctacgcgtatgcccaggacaacctgtgcctgctggccaatgaagtggtcacggtcaacggtcaacgcgccaggttcttcggcctgcacgaggcgacccttgaggagcgcaacaacctcgccagcgatgtattttttacctggctgaacacgcctgaagccgtcgccttgttctggaacgcgcagaccccgcagatgcagcagcgcattgagggttatgtggccggctacaaccggtacttgaaagagcagggcgcgcccaagcagtgcgaggcagaatgggtgcgccccctggtggtcgaggatttggtcaagctgacccgtcggcttctggccgaaggtggtgtaggtcagttcggtgaagccttggcaggtgcgacgccaccccaggcgactgcggctgtgcaaccgggcacgaaagcctttgaactggccgccgccaatcaacggcgtttcactttcgaccgtggcagcaacgccgtcgccgtcggccgcgaccgctccttcaatggccgtggcatgttgctggccaacccgcattttccgtgggtgggcggcatgcgtttttacgagatgcacctgaccattcccggccagctggacgtgatgggcgctgcgttgccaggcttgccggtgatcaacatcggcttcaaccagcacgtggcctggactcatacggtcgacacctccaagcatttcaccctgtaccgcctgacgcttgatcccaaggattccacgcgttacctgctggatggcaagtccgttgccctggaccaaaccccggtgaaagtacaggtcaaacagccggacggcagcctcagggtcatcacccatacggtctacagctcggcattcggccccgtggtgcaatggccgggcaaactggattgggacagccactacgccttcagcctgcgcgatgccaacctgggcaacgaccgcgtgttgcagcagtggtacgcgatgaaccgcgccgccagcctaaaggacctgcaagcctcggtgcacaccctgcaaggtatcccgtgggtcaacacggtggctgcggatgatcagggccagagcctgtacatgaacctgtcagtggtgcccaacgtcagcgccgccaaactcgcgcaatgcagcgacccgcgcgcgggcctgcaaatgatcatgctcgacggcgcccacagcgcctgcgcctgggatgtcgatccgcgtgcggcccaagccggcatttttccggcggaccaactgccgcaactggaacgcaccgactatgtacagcactccaatgactccgcgtggatggccaaccccaaggcgccgttgacgggcttctccccggtgatcagccaggaccacatcggccttggcccgcgcgcacgcttcgccgtgcagcgtttgcaatcactggagaaacagccaatcaaggttgcggatttgcaaagcatggtgatggacaacgaggtttacctcgccggccaggtgatgcccgacttgctggcgttctgtgccaagcgcctgggggccgacgctgcggccttgcaaccactgtgcgacagtctcaagaactgggaccagcgcgccaacctggacagcggcataggcttggttcacttcattaacctggtagaacatttgcaacaaatccccgacgcctggcgtgtcgccttcgacccagcccagcccctgaccacgccacgtggcctggccatcgatcgtgagcccgtggccaaagccctgcgcgaagccatgctggcgtctgccgccgacgtcgccaagttgggtgctttgcgctggggtgatatccaggtcagcggccagattccgatccacgggggcccgcaggagctgggcatctacaacgccatgcaaaccgtgccccgcgccgacggcaaacgtgaagtcgtcagcggcagcagctacctgcaaatcgtcaccttcgatgacaagggcccacaagccgtaggtgtgctggcgttctccgagtccagcgaccccgcatcgaactactcaaaggaccagacgcaggcattttccgagaaaaaattgcgcgtgctgcctttcaccgacgcccagatcaaagccgacccgcagtatcagcagcagctcatcaaggagtagggcaggcacgcaaccccttgatgccactgcgaaatatttttgaaatcaaggggttgcaggcaaaagcaaatgagtacataatggcgcccatcgaacgcaacgaagcattaaaaacttcaatgtattcaataagttagagtagaggcaggcttcacgaagccactcaagttcatatgcggtgaatgccagcgacaagggcgttgatcgtttgaggccgagtagcaaaatggttatgcagcggattgcaaatccgcctacgccggttcgattccgacctcggcctccactcttgaaaaccccgtagattagcgtctacggggttttttattgcctgcgatttatgatcccttccgcaacttttgggatgccttccgcagcctcgacgcttttcatgccaggcgacgctgtatcagcttttaaatcgcagttcgtttttggagtgtgtgaatgcagggcaacgttaaaataatctcgaattgccttggaggttggtatttgtgttagaaccgtagcgggcgtcaaatgaagcccgaagaacatgacaatggcagataaatagagaagttaatctatggaagaattttctgtacggcatcgacgctttgtagccaactacttcgctggcaaggtcaaagagcttcgctttcaacttgcaattgtggttgctggctgtgaccaatcgctaagtgcgtttacaggcgggggagaggtttcgaaggatattgacagagcggtcctctacggtttctcggcgtttacaaatgttatccagactctcaaagatgcagtgaagacagtgaccaatgaaaatttagactggtcaaaaatagagcgccttcggcatggctcgttcatgcgcaatgtccgaaatgctgcgacccatgatggacatcctgtaatcagtggatgggccgatggacgttacttcgtgccagcaaagatcattcgtatagatgggtacggtaagacggtagaaattccggctcctacggaagatgtcagagcggtatgcctgaattttgctaaagatttttgtcatctgttgcgagatacattactagctgcggagagtgttgagcaccttagaggatcgatgtttaatatcgaggaggtagaagaggcgtttgcaaactccacgatcattccttctttcgctaaggaacttttcgcccaagatcgagaaaaaatcgaagctgctctcaaagaaataaagcacgatccagttgcagatgcggtgaaagaattaggtgaagtaatccagtattgcgattcggtaacgggtgactgagttttgcgatgtcgggggatatactcccccgcatcattttgtggaactcacgatctcacccacgcggcgataaaccttcttggtcatatcttcggtgctgtgaccgagcaagcggctggcgtgcgtcaaccgatctcgctggcggctttagggcgtatgtctttgaactggaactggcggatcaggacgaccaaggctgcgtcgccatcggctccggccttgatcgcggctttctcaccggcttcgtcccggcgattgcgcagcatctgctggctcatccgtaggccggatgtgttggtgatcagtctggatgtttttatgccgttgagtgcgcgtcgctcctgcaggtcgttgataaaggcactcagccctgactccacgccatcttcttccaggcgcaggcgtagcttcttcgcgctctttccctgtttgaccatcaaacagacttggcggccctcggcaatgccgctgcccgccaagcccgtgcggagcaggacaagcgcctggacattaagcagcaactcaccgcccaagaccaacaacacactcgagaactttccgatgcgcaacgtaaccaggctacttttcgcgatcgccttgccactgctgatgtgcggctgtcagtccttctcgatgccacggattcagccagtggttgcgacgtgcctgccgcctccagcgccgtcagcgtggttcatgctgcccgtcgagcccaacttgacccagcgcatgctcaacgaattatcgccatcaccgattccggcgaccaaggattgatcgcgttgcgggcttgtcaagcttatgtaaaaaaaatatctggtggtgggtgagcgcttttttggagcgcgtgcatctcatgcgctcaaaatatctgctctttctgggggaagtagcgggtttagatgaaagaatataaagtaaaaccccggtctgaactctaggtgctgagcgaatggattcaatattaactgctttgccttcaatacatgtaaccctagttggtatttttggcgcatttgtatgcggcttaggtatttatgtgcttcaaaaagtgcatgaggttgctgacgcaaaatccaagcttattgcggagtgtggcttgttacgcagcgaagtatatatgggggcaggagagggtttcttagatgaatatggcgagatggattgggaacgtgctaaaaaatgtgttaaggactgcggctaccatgcattagagtttaaggatgatgaggcgagattggaagcgtttgagaacctaatgcgcctgatgggtgttgtattttcagtttatccttttttttccaatagattggaaagcgggcaagtgttaagtgaaggggcgactagaaagagagatgctgagatagactcagcgcgcatagttgaattggagttgagagtttctgaaatatatggaaggcttagtcattttcaggtaaaaatttatgagttggcggagatttgctcaaaaattaagcgtgaccatttagatagtttgagaggtccgagcgttgaagagctattgagcgctaatccgggcctgcatcccgagcaagttgcactcattcgaaaaagtcgagagcgcgtatttacacccgtggagcttaattatggtgcgttagttagtagctccttggtggctcttgagaaatatagagatttcgttattcctaaagctaaatatttactggctgaacatggtaagtggggcgctagattcgcgtccagaaaaatgtccatatttatgttgtgttcagttttttttattttgcttgctggggtgttcgcccctccagtggtgctttgggctagggaaaactttgacttttgttctacgtattcgctgtgttggagcaagtggtactcattaggcttgctgatttccactgcagctccttattttttgatcgggggttggtgttggcaccggtacctcccaaaacatgacatctgaagacaaaggcataggtcacagagctgcggaattatcatcgggttattgtttagcaaaatggatgaaaaaccattccgcaatcaatatcagaccccctgcgttgcttggctatgcaacgagcgaggattgagctgatgcggaatggatataaatttaacctattgatttataaggatttatatgtggattgcaaatccgcctacgccggttcgattccgacctcggcctccactcttgaaaaccccgtagattagcgtctacggggttttttattgcctgtgatttggcgtttgcgccacgttcaatgccaattcgctccagctccatggcttcagccagcgtcaaagcgcgtacgacggatgcgggtcaaaaatttcatggaatacatccattagacaaacgtcttatccgaccacgcgccgaaataggcgagtggcgatgcgttccattcaaatgccgtcaccctagcctcttatcctgagagtaccgttaatgaaaaaactcgctcgcgttgtggccgcttccctctgcgtggtcgccggcattagccatgcggctgatgcaaaaaccaccttcaagccgttttctggcgttgatatcagtggcgtgtatgaatgtgtgggtaccgatgtgcacgacggcgaaggcaaaagccagatgacactgaccttggacagcaagtacagctcgggtaagtcgggtggctataaagccacagtcgaagccgatggtgcgttggtctacaacggttctgtggtcgccagtggcgatcatttggcgatgaacttcgtcaacgtagatccttcgaagaaggattttggtgtggcgctggcgaaagtcagcagcccggccaagggtaaattcaagattgaaaaggcttactacgagcctgaatacatgggcggtggtaacggtgttgagacctgcacctcgaaataacacggtactgcacagggttcaggatgaatcgttgctgtattgaagtgattgataactcagccaggcaggactctggttgagttatatcttctctgcgctgtaaatcgtcactgttaaaccttccccccacgtgtcaggcggcggcaatcggcgctggctgctgtgccttgaaatttctttttgccatgttcgaaatcggtttttcaacaaacgtgaagctgatgtaagacaccgcaaggagggtgagaataatcagcacgaaggtgaacgctgcattcaggttgaatgcgtgttgcactttcatcatcaagcacatgaccaggacgtgagagaggtaagttgagtaagaccagtcgcctaacttgactagaacacctgatttgggaaagaagcgctccagcgatacggccgccaacaggatcaacgcacagggtagacctgattgcagcggcttatgcagcacctgcccaacgtgcacaatcatgccaacacccagggcaagcagggttagagaagccgccaaaggggttctttgtacccagccccgtttgtaagccatggcaatgagaatgccaaataaaaactcatacactatcttattggcgtaaaaggcaagatcgccacccaggcgcgacagaaacttgcagagtacaaataacccgagggcaatcagcgggagtctaagtgttttcgggccgtacaggcttaacagaaagaggccgtaaaatgccatttcataattcagcgtccacccgaccgtgacgagggggaaggggcccacgcctgaggggttttgtgccggtataaacagaaggctttttagaaagaaatacgcttcgaactgggtcagcggaacgaagtttggtgcggcaatcaataccgctgcggtaatcgttgtgaaaatccaatacgcaggcacaattcgtgcgagccggtgagctataaaaatccctggcgttatactcttaccagaagcggaaatgtaaatgacaaaaccgctgatgatgaaaaacagatctacgcccaccgcgccgtaagtctgcagggcgatggacagtgggtcagtcaaactgaagttgtgcactatctgcatgtagtggtgcatgaccaccagccaggcggctagcgctctaagggtttgtaccgaagtgagcataaggtggctgcgcaggaaaaaaagcgagtatacctgtgtgcagttaaccttttgtggggaatcaacaggaatgagaatctggctgatggtgttggccgcggtgatgctcgcggcttgtgcggacagcggccccatcaaggttgggcctgacacttatacgatttcaaccagagttcctctgggcggacctgcgtcagcaaaaggccaggcattgaaagaagccaatatattctgtgattctcaggggcgcgagatcctgcttgaccacatgcaggcgagtgagtgcgcgctgcacggtggctgtggagaggcggaaatatttttcttctgcctggccaagggcgacccacagctaaaacgtcaaaggtacagccctgacccaacgcaaaaaattgaaatcgaccaacgctgaagctttacgctcttgtgattccgaggacctgcgcgccatgtcgaacaccgccaccgtattcgcccagcaattcttccacggcactcgggccagccttgagccgggcgacttgatccgtgtcggtttcccgtccaatttcaccgagggccggccactctcctgggtgtatttcacggcgacgctggatgccgccatctggggggctgagctggcgctggggagtgagccggaacgcatttatattgtggaacctactggggcaatcaccgatgaccctaatgtgacggacaagaaattccccggtaaccctacgttgtcttatcgctccaccgaacccttgcgggtggtggctgaagtcacgaagtggcaagggcatccgcctgaacggctgcaaatgatgaaggacaacctcgccaagatgaaagcgcagggtactgatgtgatcatcgactgatcgcagcagccccctcagacttgaacttctgcccggatgatgcgttgctcccggacttcacccgcgtacccgccaatccgttgctgttgcgcggtcagcaatgcgcccagcttcatcagcaatagggcttcttccggtgttttcgcgttggtggccagcctgttcagctcaaccactgaccagccgatcacggcggccgcatcttccaggtcgtagaacaatgcctgctgtgccgtcctcgggccgtcgaggccctggatcaattctttcatctatttgcccacctggcgtttgttgagttctaaccccatgaccagcattccgatttcaagcaagtcggtgctgaacgagatttcgccgatccgccggaacccgaacccctcgtaaaaagcctgagcctttgcgttgttcttgaggacatccagccacactcgttgctcaccgcgttgcgcggcctgctcacagataaaacgcagaagttgcctcccatagcccaagcccgctgcggatttgcggaagtagattttctgaagctctgcgcccgtgtcacccgtcactggcacaaccgttgcccagttcaccttggcaaagcccaccacttgcgcgcttctgtctgaaacgatgagccacaggtgccgttcaggcgctgcgagcgattgaccaagcgcggtgagcgaaaagtcctgatcgagaaaaccctccagcccgactggcgaccagatcgttgaaaagtgttcccggtaagtctcgcaaccgacttcacgcagggtgtcgaggtcggcttcagtcgctttatgaattctgatcatgggcttccttttcataaaccgggcttaagacgaaatgatggggctcatttccccccaagtcacatcaagaaacgttccagtaataaacgaagcctcttcaatcgccaaccacaggattgcctgcgtgacttcttcgggctggccgcctcggccgatgctaaacgactcaagggcgccttttgaggcagcatagtcgacatattcgttcgggctgccgagccgcgcggcacccgcggacaggttgatcaccacgccaccctggccgttatggcgatgggacatgcgcttgatggtgaaaaccgccagacgggacaggaaagtgtggcgtcagccaataaggaacgtgccgagggcaatcactgcacacgcgaaaaacttacgcagggtgagggtctcgctcagaaaccaatgcccgatcagcgccgcaaacaccacgctggtttcgcgcaacgcggacaccgcgcccatgggcgcaaaggccattgcatagatgatgatcccgtaggccagcagtgagaccaaaccgccggtgaacgccgttgcgaaacccgggcgcggggtgaacaggctgcgcgttcctcgcaaggcaatatagaccagtggcatcagcacgccccatagcgcactcatccacacggtgtaagccatcggcgcgccggacagccgcgcgccgatgccgtcggtcacgctgtacgcggcgatgaacaagcccgtgcccagagcgtagggcaggcctggcacggcaagcctgcgtttgttgagcgcgagtgaaatgatcccgcctgataccagcgcaatgcccagcatcgcatggtttgtgacgttttccccggcgaacagcgcggcggcgagggtgatcagaatcggcgaggaaccccgcgagatcggataggtttgccccaggtcgcccaccttgtagctgcgcaccaggaagaggttgtaacccacatgcagcacggctgaaagcacggcgtaaaaccagctggcttgcgcagggggcgcgaggaacacggcaatggcggcgctggcaatcgccaccgcgaggcacatgacggtcatggaccacagccggtccgcgccgccgcgcaacaatgcgttccagctggcatgcaagagggcggcgaacaggatgagtaaaacgatctgaaaaggcatgcgccatcgtaggaggcattgggcgccgactaaagcgaagtcctctcattggcccatgagcaaattctcatgttttaccgatagcgttgctgggcctggcttgattcggccagcagccattcgcggaaactgaccacgtggggccgggattcgatacctttggggcagacaaaataataggccacgggggagtcgaatggcgtgtcaaacagcctgaccaagcggccatcggcaatctcggtttctacgtgcccgctgcgcgccaatgcgatgccgtgacccaggagtgcggcctcgatggtcatgttggtgtcggcaaacctgacactttctttcagcgcagaaacgctgacacccacctgctcaaaccacgcctcccatttgggtaccaggtccgcaccgtcgcgcgtcagcaaggggtagcgcaatagttcggccggctcatgcggattaccgaaacgtttgagcaggtcggggctggccacggggaaaatctgctccctgagcatgaactccgaatacagccccgggtaattgccgttgcccaagcggatcgcgacgtcaggttcgtgactggcaaactggatggccttgtcgctggtctccagcgtgatcagaatttccggatgctgttgcgacaggctcggcaacctgggcaacagccacttcagcgcaaaggagtaggtggtgctgaccttgaggcgcaccctgcctttttgttcgcgaaggtccgagagtgtggcctccaggttcatgaaaaactcgcgcacgatgggggcaagcgtggcacctgccggtgtcagccttaacgtcttgccgcgctggaagagctgcaagccccagaggtcttcgaggtgtttgagctgatggctgaccgcactctgggtgacatgcaactcttgcgacgctgaggtgaaggtcgcatgccgggtggccacttcgaaggcgcgcaaggtggcggtagggggcaggtttttcatgggggcgcctcggcgaacggcatgagcgaaggctcatgttagttcattccagggttacagcgtccaccccaatccaagcgccttgtgcaacgaggcaaaatctttcaacaactcggcgtccccggaaatccggctttcctgagcctgatagcgcgtgcgctcggcatccagccagtccagtgtactggcggtacctgcacgatagcgctggcgggtcaggtctgcggcgcgcactgcggaagactccacgttgcgcagcagcaccacgttctggcgttgatgcccgtagcgcgccaacgccacgtcggcatcgcgcaaggcgcccagcacggtgcttttatagtgcgcgagcgcttcgtcacgcccggcctctgcgcctttgacgctggcggctacccggccgaaatccagcgcgttccaactgattcgcggcaatatcagccaggtgccgttgtccttgcgcgccaagtggcccgggtcaccggcggaaaaggagaggtcgcccatcaggctgagcttgggaaaccagtcggcggttttttcgccgatctgggcgttggcggacgccagttggcgttcggccatgcggatatccgggcgggccttgagcagggcggcggggtcggccagcgggaccctgctggggatcgagggcagggcacgggcggcggccaattggccatccagttcgccgggctccagcccgcacagcaggccgagttggtcgagtgactcaacgatggccgcttgcagtggcagacgctgggcctgggtgttttccgcctgggtcaacacctgttcaagctgcagttgcgaggcgacgccgcgactgcgccgttgttgggtgaggtccagcgcctggttttcgatgtcgacactggcatccaccagggccagccgggcctgctggtcgcgcaggtcggtgtaggcctggacgatttcggccgccagttgcacctgggcgtccgccagttgcgcctgcgaagaatcggcctctgcctgcgcggcttcgacagcacggcgtgtgccgccaaacaggtcggcttcccagctggcatcgaagccggcgaggtagaggctcaaaggcccgcgaccgcctccggtgttgccacccagcgcggatgtgtcgggggagcgcagcttgagcatcgccgcgtcaccggtgaccttgggcatcgcgttggcgctggcaccgctgaggctggcgcgggactgtttgagccgagcctgagcggtggcgatatcggggctgtagtgcagggcttgctcaaccaggtcgttgagctgtgcatcacccagcgtgcgccaccattgggcgacggcgggcgtgacctgcgcggattgatcggcatggggcaagtgcccggctgcgagggttttcggcgcaacatccggcgcgcccttgtagtccgggcccacggtgcaggcggacagcaggccgacggccagcagcagcggggcggtgcgagtcatcatggttgtaccgtgcgttttttcagaatgaagatcaggggcaggcacgccagcatcgcgaggcccagtacataaaacgagtcgttgtaggccatgacagaggcctggcgggcgatgtcattggccatttgcgtcagggcctgcatcggcgcgctggaagggtcgccggtctgcgccaggtagctcgcggtactgcttgccatgtggtcctgggccagctggctgttggccagaatgccttcacgcagccggtcgtcatgaaagtggctgcgccggtccatcagcacgccgagcaaggccaggccgatggtgccgcccagattgcgcgacatgttgtagagcccggcagcatcgccggcgtgttgggtttcgaccgagcgcatcgacagctggctcaggggcatcatcactaggatctgcccgaacccgcgcagcagttgcgaccagatgaagtcatgcccgacgctgtcggcggtgagttgggtgtcgagaatgcaactgccccagtacatcagcaaaccgaggccgaccatccagcgcaggtcatagcgccccagcatccttggtaacacgggcatcagcaggaaggccggtatgcccgacaacagcatgatcgagccggattgctgcgcgttgtagcccgacaagatgccaagaaactgcggcaccaggtacgccgtgccatagagcccggcgcccactgcggtgccgatcagcaacacgctgccaaagcttttgttgagcaccagctgcaggcgcaatatcggcgtgctcgaacggaactgtccgacggcaatcaggaaaaaaccggtgaccgtggcgatgctcagccaaatgatcagcagcgagtcgaaccaatgctcgcgctggccttcttccagcaccacggtgagcgaactcaagcccatggccaggccgagaatgcccagccagtcggcgctgatgaaacgttgcaggttcatgcgctcggtgggcaagccggtgatcaacaaggtgatcaatgcgatgctgatcggcaggttgaggaagaaacaccagcgccagttgatgttttcggtcagccagccgccaatcaccgggccgagcagcgggcccagaatcacggtcatgccgaacatcgtggtgccgatcgccaattggtgcggcggcaggcgggtgcgcacaatggtttgtgcggtgggaatcatcgcgccgccggcaaagccctggccgatgcgcccggcgatcatcatgccgaggctggaggacaggccgcagaacatcgaaaacgcggtgaacatcaacgcggtaccgatcaggaaccggcgcaggccgaacacccgggtcaaccaggcggcgagggggatcatgacgatttccgacatcaggtagccggtggcgatccacgtgccctcggtgccggtggcgccgatctggccctggatttgcggcagggccgagttggtgatcgacacgtccagcgtcgccagcaacgcgcccaacgctccggcggcgacggcgatccagtcagtcagcgaggcattgcgcggtttttcggcggccacttcggccatcagcgcttcagccatgattggcgtctgcgcgggcggtgcgggtgtcgacttccacggtggccgaaaggcccggcatcaaggccatgcgtacatcatccggcacgtccagggcaatacgcaccggtacacgctgcacgattttggtgaagttgccggtggcattcgacggtggcaacagcgcgaattgcgcgccggtgccgggggagaggctgtcgatatggccttgcaggttgcggccgggcagggcgtcgatgtgcacgctgacggtttggccggggcgcatctcgccgatctgggtttccttgtagttggcggtgaggtagatcgcgctgatcggcaccacggtcaacaggcgcgtacccggttgcacgtactggccgacccgcacgccgcgatcagccacgcggccatcgagcggactgcgaatcacagcgtcatcgacgtcgagctggctttgtgcctcgctggctttggccacgccgagttgcgcctgggcctgtttgagttgggcctggagggtgccgtagcgggtttggctggacgccagtgcagcctgtttggccgccaccgtactgcgcgcttgtgccaattggttgttgagttgcgccaggcgttcttccggctcggcgccggaacgtgccaacggcgcgtagcgggccacttcggtctgtgcgtggcgggcgtcggcttcggcgccttgcaactgggcgcgggcctcggcgatggtcgagtcctgttgcaccaggtcggcctgggctttggcgaagtcggcgttacgtgcggcgatggtggcgttggcttcgtcgctgacggcttggtatttgcgcgcatccaaacgtaccagcacgtcgccgcgcttgacgttctggttgtcgctgaccagcacgtcggccacgtagccgttgatctttggcgccacgctgatgctgtcggcttgcaggtaggcatcatcggtggtctcgataaagcgcccggtgagccaccaccaggcgccccagccgaggccgatcagcaatgcaacgatgcccagtgtcaggagtattcgccgggctttgccgcgctggccgttggcggtgtcttcaggaacgacctgaggcgagggaggtgcagcggacatcgaggtcactccagatttataacaggtggaataaattctatttttcgcgaatttttgtcaactggtatattttggtcgggtattcgaaaggagttgcacatggcacgacataaaccagccgccgaagggggttaccagcgcggcgaagaaacccgtgcacgcattgtcgaggcggccgtcgcggtattttccgagcgcggttatgacggtgcatcgacgcgggacatcgccacggcagcgggcgtcaatgcgccggccatccagtattactttgacggcaaggaaggcgtttacctggcgtgcgtggagcacatgatcgagctgatgtgggggaaaatgggcgcgcccgtcgaggctgcggaaagcaccctggctgacgccgacgcaagcgatgaggcgttgatcgcggcttcgctgggcatattgggcacggtggtgtcgaccattcaggacagcccgcaaaccagtgccatgcgcgcgttcctcgaccgccaccaggcagggctatgcccggcggtggcgaccaaggcctttgaagaacgcttcaaagcgcgtatcgggcgggtgatccggcaactgatcgcgcgcctgtccggctttgcgctggaggatgagcgcaccgtgatccactcgttggccctgtttacccaggggctggcctttcgcgtgcaaaagcccaagctgctggacgcgctgaaatggaccgccgtgaaccagaaggaaatggagctggtgcgtgatgtggtgctgatgcaggcaaggtttacgctggaggggcttgtggctcagcgcgccgaatagggcacacccaactcccaccgcgactgccagtgctcaaggtactggcgcgccacctccgggtgattgcggatgaccaccacgttttccgagttggccgtttccgccgacgctgcgtagttgaacgagccggtctcgacggtggcgccatcgacaatgatggttttgtcatgttgcaggtggaagtggtcgctggtgcgcagttccacgccgttgcggctgacgaagtccatggctttgcggctggctttgccgaggttgcgctttttgtcgatgacgatgcgcacgttgaccccgcgctttttcgcgtcgaccagcgcctgagcgatgtcggtggcctggaaggcatacgccagcatctgaaggctgtgttgcgcaccgccgatggtgtccagcaccaactgccgtgccgagccttccggcgagaagcccacttctatgtcgggcgctgcgacgcaaacggcgggcaggcccagcaaaagcaacagcactatgtgtcgaacggtattcatggttccggctcctgagggggcaatcagtaggcttcacggggaatcatggagatgaattcagacttgaacagcgcctccatcacccgcatgaaatccgatgccagctgcgagcgttgctggtggctgggaaacacgatcgatacctcgaaggggatgtgctggtcgagctttctgaaggtgatgccggggtacttggtgtaagacgcggtgaaggggtcgcagaccgtcagccccaaaccgcccgagaccatgccgcaggccgagtgggccgcggtggtttgcaccgatgaaatgcccgtcacgccacgcgcttccatggccgagttgattctgcgttgcaaggggttgttggtattcatggagaccagcctgcgcccgtgcaaatcgtccagggtgaccacggtttttgccgccagcacatcatccaccggcatcacacacacagcgctgataggcggcagtgccacggcctggataccggggtattcacccgagggaatttgcacaaagccgatatccagctggtttgccgacgtcagctcaagaatccccagcgagttgcgcacgtcgagtgaggtccgcacatccgggtgcctgcgggcaaagcggcagacgccttcagccactacgctcaggcccagcgtgctcatggcgccgatgcgcaacgtgccggtgcgcagggtcacgaggtcttctgccacgcgctcaatccgctcgatgccttgatagaacttgtcgacttcggcatacagaacctgtgcttccgcgccgggaatcagccggttgccttcgcgccgaaacagccggagggccagggtgacctccagatcacgaatcagccggctgatggccggctggctcacttgaagggtttccgccgcgatggtcatgctgcctgtctgcatgacggtgcggaaagcttccagttgacgtgggttgagtttcatcgttgttctcgaaaaggcactgttaaagcacgttgtggagcctataacattttgttatgtgcgtccaacaagttgccggtttgctatcaggttgtcaccgggcgatgatttagttgcgtagttttaaccggcaatagcccgcagtaaatatcaataatacgggcgaaaaataacaagaggaaggcgcgtgcttaattacaccttgcgcaggttgttactcctgcttccaatgttggcgggggtatccattgtgatatttctggtcatgcactttataccgggtgatccggcacaactggccgccggccccgatgcaacagcagaagatgtggcgcagatacgcactaattatggtttggataaaccactggtcactcaatatattatctatgtaaagaagatcgccactggggatttcggtgaatccttccagacattcacacccgtgctcgatggcattgcccggacactccccgccacactggagctgacgctggcgggtatgttactggccgtaatcgtcggggttccacttggggttttagccgcgctgaggccgcgtggcatgcttgacagcgcgctgacaacctttgccgtgctggggatctcggtgccggggtttttccttggcctcatcttgatgtctatcttctcggcgtaccttggctggctgccacccacagggcgcggcagttggcagcacttgttattgccggccctgaccctgggcctgccctatgtcgccacgttctcccggctggcgcgctccacgatgatggatgtcttgcaggaagactatgtgcgtaccgcctatgccaaaggcgtgcccggttacacagtggttatcaaacatgcactttccaatgcagctattccattggtcactgtattcggggtggattttggcaggttattgggcggtgcggttattgtcgaaacagtatttgcctggccgggcatgggccgatatttaattgatgcaatcatggcgcgggatctctatgtggttcaaggcacggtattagtgtttgccgcgttggtggtcattattaacttactggtggatctcatgtatggcttcctcgaccctcgcatcacctataactgaggccgctatggttaattcaaaaagacgtgggttcgggtttgtcagttttctgatctcgaacaagcgatggtttgccttcagcgccttggtggttattgcattcatgctggtcgcggcggtgtgtgcgccgctgatattcagttgggacgcggtgacccgaatcaatttgtccagctccctgatcaacccgggcgccgactttttgctgggctcggatcaaatgggccgtgacttgctggggcgtgttctgtggggggcgcgaatcaccctgacagtggcgatttccagcgtggccatcgcgatggtggtgggggtgtcggtcggcgcggcgtgcggttactacaacggtgcgctggccagcctggtcatgcgggtgatggacgcgatgattgccttcccaagaacgctggtagcgatcctggtgattacggtggtcggtaacagcatcctgagcctgacgctggccatcgccctctccagcattcccatctacgtgcgtttttttgccgggcctgttgcggcattgaggcaccgcgagtttgtactggcctccaagtccatcggcgtcggcaacctgcggctgttgcgggtgcatattcttcccaacatcggttcgctgatcattatccaggccaccgtgtcgctggcagaggccatcctgatcggctcggggctcagttttctcggcctgggcccaccgccacccacgcccgagtggggctcaatgatcgccgagtcgcggccattgctgaccacacacccttacatcttgctggcacccggttgtgccctggtgttgacgatcctcagtttcaacattctgggggatgcactgcgtgactatatcgacccgaaatcgcgcaaggcttgacgcccagcggtgcccaaccgacggcctgttccatacaccgataatcaggtgagaaagatgacgcaacgcttaagattcctggccatgctgatcggcggtttttgcgcgatcaaccttgtcgaattgcccctcggcgcggcctttgcggccagcgccaacgacacccgcaccatcacctttgtacaaggttccgacgtggatacgttggacccggccatgtcacgcagtgtgccgtcttacaacgtgacggatcatctgtttgattgcctcgtcgcctggaaagggcaggagcatgagggttttgttcccggcctggcgcaatcgtggactcgcaccgaagacggcacgcaatggacgtttgtattgcgccagggcgtgaagtttcatgatggcaccccgttcaatgccgaggcagtgaagttcaacctcgacagaatgcttgatccgaagctgggttctgcccatcgatcgtattacaccgatatcgactcggtggacgtgctctcaacctacgaagtgcgaatcaccacaaagcacgcctcaccgacgatgctggaactgttggcaaagcagtcatcttccatcagcagcccgacggccgtcgccaaatacggcagggcgtatgggcaccacccagtgggtaccgggccttatgtctttgtaagctgggtgcccaatgaccaggtggtgatcgaacgtaacccggcgttttatggcgaggcgggcaagccctcgagaatcatattccgcccggtcaaggaagacgcctcgcgtgttatcgagctcagaacgcgcaatgccgagatagcgggaaacctgtctccggaagccgccatcgaattggctgcactcaacacgtccaccttgttacgcgtgcccagtacctttcaggtgttctttgaactgaacctgaccaagcctcctttcaacgacccgcgcatacgccgcgccgtcagcctggccatcgaccgtcaggccattgtcgacaaggtactgctgggctacgccaaagtgccgaccgggccgtttccgcccggcacccaggcgcggcgtgagtttgcgcctgtgcactacgaccccgagcgtgcgcgccaactgatcaatgaagtttacccaggcggttatcccggcacgattgttctgtggacgccgtccggccgctacaccaaagaccggcaggtggccgaagtggtgcaggggtatttgaatgcggtggggctcaagaccgaattcaaggtgtgggaatgggcgacttatcagaaaaacctgtaccgcgctgaacccgggaagggcacgggtaaaggctccaacgacgccaatatgtggctgttgggcaccggtatttccgacgccgacatacgcctgcggcgcaagttgtccagcggcgacccgcaaaacttgacggggtatagcaacgcccaagtggatcactacctccagttggcctcgcgcgaactggatccgcaaaaacgcatggcctattacgggcagatccaacaaatcctgtgggaacaagacgccgacaacctgccgctgtttgatcaggagcagttgatgggcgtgcgcaaaggcttgaccgggctcgacgtggactacgacgggaccaccgatttaaagcatgtagaactaattgagcggtgaatgaaaatgtccaatgcacaagccagtgaagtgttgttaaccgacgcgcgtttgagcgcaccgcctgccgagcgcatggtcaaataccatgatgtgccggcgctggaaaccgaaaaacgccagttccatgagtttatcgacgtcgacctcgcgcacaccgtgatgctggtggaacagaacattctgtctgtgcctgtcgggcaggccatcctggccgagctgcggcggatacgcgacatgaaaccggcggattttccattcgatgtcaaaaaaggcagcttcctgcttcaggtcgagtcctacctgttttcgaggattggcgaagactcggccggccagatgcacaccgggcgcagccgtattgaccagggcgcgacggtacgccggttgtatgaccgcgcgcgtattctggcggtactggaccgcatcaatgagttccagctcgcgctgattgaaaaagccacgcagcacgccagcaccatcatgcccggctacacccatatgcagcacgcccagccctgggtgttcggccactatctgctgagctttacttcacgcctgcacgacagtttcagccgcttgatgcacgcttacggcagggtcaaccgcaacccgctgggcgcagtggggctggcgggtacttcgtggccgctggatcgccagcgcaccacgcatttgttggggttcgacagcctggtggacaactccaagctgggccgggaggcctggtacgcagcggaaaccatcggcgcgctgtcgtttgtcatggccgacctcaacgacctggctaccgacttgcacatctggtccagcgttgagttcgccacggtcgaaagccatgacggctattgcgggaccagcagtattttcccgcagaagaaaaaccccagtggcctggaaaccatcaagaaggcggcgggcggttccgtgacctggctcagcacggccctggccacattcaggtcggagggcactggcgaccaggccatgcgcgacctgccactgattcacgatgcactcgccaccactgagggcatgctcgacctgttcaccggaatcatcgaaaccctggtggtgcatgaagaccgcatggcgcaattgttggccggcagttggtgcacggccagcaacctggctgacatcatcgtgcgcgaccgtggcatctcgttccgtcaggtgcatcacattgtcgcgcggctggtgcgcaactgcctggccgaagggctctcgccaggccaggtgaccggtgccgcgctggatcaggctgcgcaggaaaccgcagggctggtgttggcgtattccgacgcgcaagtgcgtgatgccttgaacccccagcgtttcgtggaaacgcgtacctctaccggcggcgttggccccagcgaggtcagccgcatgttggcggtcgccagccgcgagctggagcaggaccgcgactgggtcgcccagaaccgccagcaactggcccgctcacgtgcagaccttgactgcgccgtgtcccgaattgtcgattgaaggagccacccatggatgacaatttggtagcccgcgtgcaaaacctgagtgtcggctttggcctgaaaggtcacgagtctgccgtggtgcgcgacgtatctttcgatgtcaggcgcggccagacactggcaatcgtcggcgagtccggctccggtaaatcggtgacgtcgatggccatgatgggcttgatcaaacgggcaggtgggcgagtgctgtcaggttcgatgcaattgcagacccgtgataaccgcctgattgatctggtcaacgcgcccgaatcggtgatgcgccacttaaggggcgcttcgatgtcgatgatcttccaggaaccgatgacctcgctcaacccggtgttcaaggtcagcgcccagttgactgaagcgatcctgctgcacaagcattgcagccgcgcggtggcccaccagcaggcgttgcgcatgctggagatggtgcgcattcccgacgctcgccaggtcatgggccgctacccccatgagctgtccggcggcatgcgccagcgcatcatgattgccatgtcgctggtgtgtgagccgaccctgctgattgccgacgagccgaccactgcgctggatgtcacggtgcaggcgcagatcctgcgcatcatcaaggagctgcaagccgaccttgccatgggcgtgattttcatcacccatgacatgggcgtcgtggcggaggtcgcggaccaggtgatggtcatgaaaaaaggcgagacggtcgaacagggcactgccgcggccgttttgctcaacccgcggcaaccctatacccaggcgctgctggcggccgtgcccaggatcggctcgatgcgcggcaccgatctgccggccaagtttgccttgattgacgagcctgccgcctcggccgaaataccgcctgaaaaacagcctgactatgggagcacgccgctgctgagcgtgaagtcattgtccattcgttacgacatccggggcggtttgttcggcgcggtcaagcggcgggtgcacgccgtcgaggccattgacttcgaaatctatgccggcgaaacacttgcgctggtaggagagtcgggctgtggcaaatccaccagcgctcgcgcagttgccgggctgatgcccacccagggcggggatattgtctttggcgggcgcaacctcgcggcgttgaactcgcgagacatgcaaggtgtgcggcgggatatccagatggtgttccaggacccgtatgcgtcgctgaacccgcgcctcaccatcgaggacagcgtgttggagccactgctggtgcacaacatcgcccggggtgacgccgcgcgtaaaaccgtacgcacgctgctggagcgcgtgggcttgcctgccgaatatgcccaacgctacccccacgagttttcgggcgggcagcgccagcggatctgcattgcccgcgcgctggcgttatcgccaaagctgatcattgccgatgaggcggtatcggcgctggatgtgtcgattcaggcccaagtgattaacctgctacaggacctgcaacaagagctgggtatttcatttttgttcatttcccatgacctggcggtggtcgagcgcgtcagccaccgggtcggcgtgatgtaccacgggcgtatcgtggaaatcggcccgcgccggtcagtgttcgaaaaccctcagcatgcctacacgcaaaagctgttgagcgccgtgccttcggctgacctgaacgcccctaaaacaccgttcagcctgatggatgaggcggtgccgagccgcatctacgatgtgaatcatcaggcgccggcagtgagttaccggcaggtgggccccggccattttgtagcgaatgcggccattgcatagggggccgcggcggccgggcgttgtgaaatgttgtgaagcaccatggaatggccctttgcccatgctaacgtccgcgtcggggtatcgtcagcacgacgatttcattcgttccattgagggagcagcgccgatgtctactaccgtaacgcccgcggctggcgggtcgaacactcctaagtcttcaccgtcttcgttcgacgacaagttgaacattgccaagtccagcaaggttatcgccgattacatgcgccagtcgggcaagtcggccatcaccaagcaggaactgacgcaattggccaataacgcttcgggcaaggtgccaaccgatgtgtccgacgctgccaagtacatggagcgccatcctgacgtcttcaccgccattgaaacccacgacgtggccggtgccgacaacctgtccggtgtgtggaacttcgactgggcggccaacggcggcctgaagggcacagccaccgacgccatcgccaaaatgcaggacacctttgacatggcgattgccaagtcggcacagatcaccgaaatcagtaccgctaaaaaggccgagctggactcgaccaagcaacgcccgcaaaactgagttctctgcgaagacgtcatttccggccgccggcacgggcactgcccgtcggcgccggcctttatttgcagcactcactgcctgtatgcgcctttgggcgtcctttcgcgatgcgttcagcacagattcaagcgaagtgagcaactatgcactcctgcccccgtgcccggagacgccttgatgtttgtgaccgttgtcgtgatcgccctgattgccttgtgggtctggtggacttacccacgggttggcaacgtgctgttcgagctcattggctgggtagaggcgcggcgctcgcggcttaaaaccatcaccgtgcccatcaagggcatgtccctggccacctatcagggcggcgatgcccatgcaccggcactgttgctgctgcacggtttcagcgccgacaagggcgtctggctgagttttgcccggcacttcacgggcgattatcgggtgatcatcccggacctcgccggccacggtaaaaacccgtttgtcaccggcggcgactacagcatcgccgcccaggcgcggcgcatggtggccttgatggatgcctgccatctcgacaaggtccacgtgatcggcagctccatgggcgcctacgttgcgagctggctggccacccattaccccgagcgggtgctgtgcctgggcctgatcggtgcggcgggcgtgaacctgccgcagcccaacgaagtggaggagctggtcaacagcggcgacaacccgttcctgattcgcaaccgcgcgcagttcgaccgtttcttcgccatgaccatggcggcgccacccttcattcccgaagtgctgctggccgccgaggcgcacacctacatcaagcgccgtgatgagctggcggagatttttgccaacttttccgacagcccgcgcatggaaccctggctgccgcaggtgcgggtgccgagcttgattctgtggggccgggaggaccgcatggtgcccgtggccagcgcgcaaacctggcacgagggcattccccatgcgcgcctggaaattctcgacggcattggccatctgcccatggtcgaaagcaccgagcaaaccgttgcgcactgccgcgagctgctggacaaggccaaagtgtatgcctcgatccgcccttagctgtatggggcaccggagtcgataacccactactgtccaaggcatgccaccaccgcttggatgccgcgccatgttcatgtctaccagcttgctctcggcctttgtgctgttcgccttcgtgtcctcgatcacccccggccccaacaacaccatgctgctggcctcgggggtgaacttcggctttcgccggtcgatgccccatgcgctggggatcagcgtcggcttcatgctgctggtgatttgcgtggggttgggcctgggcgaagtgttcaaggtgtttccgtgggcctacaccctgttgcggtatgtgggggcgacttacttgctgtacctggcgtggaagattgcgacctcgggcggcctgtctgacagcgatgaaggccgtggcaagccgatgacctttctgggcgcggcggcgttccagtgggtcaacccgaaggcgtggatcatggcgctcggcgcgatcaccacctacacgccggccgaaggctatgtgagcaatgtactggtgattgccctggtgtttgcggtggtcaacctgcccagcgtgtgtgtctgggtgggatgcggcagcggcctgcgcaacgtgttgcgcgaaccgcgccggttgaaacggttcaactggacgatggccgggctgctggtactgtcgctgtacccgatgttgtttgccggttgatatagccgcgtgccgccattgacggggtttggcgggctgcggcatgctcgccgctgcttgtcaggcctgctacgggatgttgcggcacgaagcgattgaacgggcgtcgggttcgcagtatcgcttcaccttcttcctatgagatacccgagcgtgaagcgtccccttgtctttgctgtgctcatggcgacgtccgtcgccaccgcttatgccaacgaccctgccgacaacctggtcggcatccgggccatcgaaaccacttaccaccaattgctcaccgagctggaccacagccgtggcggtcgcccggatggccagacccgccagcgcatcatcacggcgtcccaggcttttcagggcgcgatgcagcgcgacggtggcgcccgtgacaacctcaacaccgatgtgaaaaatatcgttgcctcccttggagacggcagctacagcgccgacggcagcattcgcgccttgcaacgtgacgccaagggcagcgtgatcgacgccgggccctggaagcccgcgcttgccggcaaccccgtcagcgagccattcggcacgcacttgaaccagaccagcgaaggcgattgcgtggggatttccgtggtcagggccttcaccaatacccagaagggcaacgagatcctcaaacgtggcgtgacgcagaatgccgatggcagtttcaacgtgagcctgccgggcgcctcaggggcggtgttccatttgcagcccggcgacctgaatcaatacggcaccggcgatgcaccggcagcggcggtggtcggggcgatgttccagtatttccacctcgacccggccaaaggctcgttgccgactaacaaggtcatggagctgctggcaggggagttcggtgaccacttgcgcctggccgatgcacacagctcgccccaggacatcagccagtttctgctgagccacgccagtgtggtcggcacgcgcgcagccatcgtgttcggtggcaaaccggcgcgcaatggcgactggtccaaaggcgatgggcatgccttcgcgattatccatatcgacccggcaaccggcgtgctcagctacaccaacccatggaacgaaggcaaacaggtgcgcaccattgccatcagtgatctggcagcccaggccgcaggcacgggcgcggattttgaaatggtgacattccgttaagccgggtcagaccggcgagatggttgccagcaggccgataccgatagtcagcaccaaaaagccgaacaggaaaattgccatcttggtcataaggcctccgaagggaagggggcggcaggaaccttcctgctgcgctcgacaagggtgtcgggaatggggccattgtccgccgggtacagatttcaatacagacgcagatggaaaagaaaaaaccgtatcagatagcgcggtggctgccgggctgcgggcccgggcgagggtgcactttatgaagatcagcgcttgatcgagccttctgcacctttgctgcccgggcttaatgtaaccttcatgggcaagcgcaactgttacgaaaaaaatccctggcctgtgcggagtaggacgtatgcaacgctggttgagcaaataccgttacgccatcattttctggttgtgttttggtgtgtttcgcacctcgttggccgactggaaccccattccttccggttccatgcgcccgacgctggtcgaaggtgacgtggtgctggtcaatcgggtggcgtacgacctcaaggtgcccctcaccgatatttcgctgctcaagctgggcaacccgcaacgcggtgacgtggtcacgtttacctcgcccacggatggcgtgcgcctgatcaagcgtatcgtcggcctgcccggcgataccctgcaaatgaaaaacgaagtgctgtggatcaacggcacgccgtccacctacgcggatgcgcaggacattcgtgaacctttcgtagccgggcaaacccttccgggcatcaagctgaccgagctggcgagcaacagccggcgcacgatccagttcatgcccgaggtgcgcgcgctgcgtgacttcggcccggtggtggtgccggccgacaactacttcatgctcggcgataaccgcgacaacagcgccgactcgcgctacatcggcttcgtgccccggcacctgctgatcgggcgcgctcaccacattctggcctccgcgcagatcctggataactggatgccacgttttcgccgtttcggctcggcaatcctctaagatggcgcccactgcacagacaacaagagtgggctgacccgcgatggaaagacgccagttcagtggtggcatgcaaggcaagaacctgcgctacctcaacgacaacccccagcagccgacgccggtgacccgcgtcggctttctgctgcttgaacacttctccctgccggccttcacccagaccctcgatacgctgatcaccgcgaacctgctgcggcccgagctgtttgccacgcgcacgttcggctgctgtgaaggtgaagtcatcagcgacctgggcctggtgatccgccccgatgcgcgccttgagccggcggcgctcaaagacctggacctgctggttatctgcggcggctttcggactgaactcaaagccactgatgacctgattcaactgctgtgcgcggctgccgaacagggtgtgggcctcgcgggcctgtggaacggctcctggttccttggccgcgccggcttgctgcaaggctatcgctgcgccattcaccctgaacaccgcccggcgctggcggaagtgtccaaggctgcgcaagtgaccagcgagcccttcgtgatcgaccgtgaccggctcaccgcctccagcccgtcgggctcattccatatggccctggactggatcaagagcctgcatggcaaggcgctggtggaaggcatcgaagacattctgtcttttgaagaatcccgctaccggcgcatcaaacccacggaaaacgtgtgcgtcagcgcgccgttgcgtgaagtggtcaaactgatggacgccaacctcgaagaaccccttgaactggaccaactcgccgtctatgccggccgttcccgacgccaattggagcggctgttcaaggagcaactgggcaccacgccgcagcgctactacatggaactgcgcgtgaccgaggcgcggcgcttgttgcaacacacggagttgtcgcaggtggatgtgctggtggcgtgcggctttgtgtcgccgagtcatttcagcaagtgctacagcgcctatttcggctacaggccatcgaaagagaagcgcctggtcaagtagcgtttccggtcagtgaaagcctgccagtggcgagggagcaagctccctcgccactggtacattgtccgccattaactgactggcatcagggcttgcccccgttccagctcgccacgttaaaaccgcgcaaacctgtaggcgtgcaggttcggaaggcttggcgtcattgcgttctctgcggccagacccacgaccatctccgccgtcaccgccgcctgcgccaaccccagatgctgatgcccgaacgcaagcaacaccttgccctcgcacacccgatcgataacgggcagcgagtccggcagggacggcctgaaacccatccagggcgtggcgtcctgtacctgcagatcctcacgaaacaacccctggctgagcctgtgcaactgccatgcgcgtgccatgtttgccggccgctcaaggcctgcgaactcaacggtgccggccaggcgcaggccgccagccatgggcgtcatgatgaacttgcgctccagtgaggtgacggcgaacggcaggcgagcgtgttcgtggggcagcattaagtgatagccgcgttcggtgtcgagcgggacttttttaccggtcagggcggcggtcagtctggcggaatgggcgccacaggcgatcaacacttgccgagccgtcaacacgccctgatcggtcatcagcgacacaccgttttcttcgatacgcccgtccagcacaggtttttgcaggaactgaacgccgtgagccttggcggcttcgaccagctcgcagaccacctggtaggggtccagaaaatgccccgtggccgggaagaacaacccgccttgaatggcgtcgctcagttgcggcgcagccttgcgtacggcctcggctgaccagaaatccaccggcacgttttgctggcgcatccgttgctgcaacgcgtcaagggcgtgacgggactcggcacgctcgtacaccagtaacgagccgtcttcacgcaacaactgcggccggtcaatggactgcagcaaacgctgccatgcacccaggctggcttcgttcaaggcgcgaatgcccgccaccgtgcgctggtagttcgccgggcgcaggttcagcagcaggcgcacaaaccagggcagggcgcggggcaggtatttccagtccaggcgcagcgggcccatggggtccagcagcatggcgggcaggcgcttgaggatcgacacgtcggcaatcggaaacacttgctcggtcgccaggtgcccggcgttgccataggaggcgcccatgccgggcggctgtgggtcgatcaccaccacgcgcttgccttggcgagccagttgcaaggcacaggccacgccgatgatgccggcgcccaccacggcgatgtcccaaggggtggattcgggcatcgcctacgcctcgctctgttcggccgcccagttggcataccagcggcggaacaacgtgtactggcgttcggcatagttgcgctgggcggcgctgagcccgtcggtttcattgaaatgcaaggtgtagccttcgtcgccgttgagcaccatcaagtgtttgtaatacagcaccaggtcacagccttcatcgaacgaggacagcacggccagcgcggcttccagctcgcgggcctgccgccgcgccttggcatcgcctttggccgcctgtttgctcagggccaccagttgcagcacttcccgtggcagggcgttgccgataccggtgatggcgccggtggcgttgcaattgacgaaaccgtgcaccacctgcgtatcgacgccgaccatcagcgtcacgttgtcgtcctgagaggtgatgttttcagctgcgtaacgcaggtcggcaccgccgccgaactccttgaaaccgatgaggttagggtgttcgcggcgcagttcgaagaacaggtcggcgcgggtggcgaagccatagtacgggctgttgtaaatcaccgccggcaagtttggcgcggccttgaggatcgccgagaagtgggctttttgtgcggtggccgaggcgccgcgggacagcacgcgcggaattaccatcagcccgtgggcgccgacctttgccgcatgggctgcgtgggccacggcttctcggctgttcactgcaccggtgccgacgatggtcggtacgccagccgccaccaggcgggccacgccttcctggcgttcagcctcggtcagcagcggccagtcacccatggagccgcaatacaccacggcgctcatgccgatatcaatcagttcacggcccttggcgacgagggcgtcgaaatccggtttgcgctgcgcggtgcacggggtcatcagtgccgggatgcagccagtgaagatggtgtcgctcattgtgttaactccattgcatgaaataaggcgaggctcagatgccccaggcaaacgggtcctgctcgtcgatcagcagcgtgctgtcggcggtcatccaggcgcggccggtgataaacgggatgacgcgttcaccttcccattcaaagcggccctcgaaccggctgccggtaatgctggcttgtacccatggctcaccgggcttgagttttccatcagcggccaggcaagcgagcttggcgctggtgccggtgccgcagggcgagcggtcgtaggctttgccggggcacatgacgaagttgcggctgttggcgctggcgtcatcggcgaatagttcgacatggtcgatcagcgcgccgtctgcgccacgaatgccctggttttccagagcctcgagcatcgtccaggtgaagtcggtgagggcgtcgacgtcttccatttgcagcctgtggccgtggtccgacaccaggaaaaaccagttgccgccccaggcgatatcgccgtagaccacgccatggcctggcacgtccaccggcacttgttgacggtggcggtaggcgggcacattacgcagcgtcaccgcgccgtcttcgtgcagggtggcggtgaccgggccgaccggcgtgtcgacaaggtgaacaccgggttcgatacggcccaagtggtgcaacgaggccaccagcccgagggtgccgtggccgcacatgccgaggtagccggcgttgttgaagaagatcacgccgcaggtggcaccgggtgtgaccggcgcgcaatacagcgcgccgaccagcacatcgttgccgcgcggctccagcagacaggcgcggcgccattggtcgtggtgggtgcgcaggtcgtgcatttgctcggcgatgctattgccgacgagcttgggaaacccgtccattaccaggcgagtgggttcgccgccggtgtgggagtcgatcacgtgcagccgtttcataaagcgctccatcaatgggtggccggaatgagtggggcgttgtgacggaccttgtcgacggcttcgctttcgtcatcttcgctgtccaggcgcaccaggtgcgccggcacgccggtggtggcgccccagtaataaatgcccaaggcacaggcggcgacgacaccggtatcaaacggatggctgatcacaccgaggccaccaaagctgccgagtttggaaagcaaaatagtcaccgcgtaaaagccgatcagccaggccgaggaacgcacttgctgtctgatattcaggtgggcggtcggcacccagcgggtacacagcaggtacaccacaaacatcaggatttgcaggcccagcagccacgacacagtgctccagcccgaccagtacacgatcagcgcggcgatgatgaatgacagcgggccgagcaccgccatgcccttgacccggaacggccgcgccatgcctggcgcgttgcgccgcagcgcggcgacggtgaccggcgccacggcgtaactcaggatcagcgccgcagacaccacgttgatcagcgcctcccaggacgggaacggcagggtccagaacaccgacagggcaaaggtcagccacagcgccgggcgcgggatgccggatttctcatcgatgcgcgtgaagatcttgaaaaacgtgccggtctgcgcccagccatacaccacacgcggcgtggcgttcatgtagatgttgccgcagccactgggcgagatcaccgcatcggcgaccaccagatacgccagccagcccacacccagtgccagggcgatatcgcgatacggcagcgccagtgcctggctgatcccggcccagccgttggcaagcatctcggtcggcacgccacccagaaaggccgtttgcagcagcacatagatggcggtggagagcagcaccgagaggatcaaggcaatcgggatcgtgcgttgcgggttctttacttcactggccaccgagatgatcggcgtgagccccaggtaagcaaaaatcaccccgccagccgacaccgccatctcaacccccgacatcccgaacggcgcaaaaccctgcgcctgaaaatttgccggcttgaagaaggtgaacagcacaccaatcaccagcagcggcacgatgaacttgaacacgctcaccaggttgttggcgatggcgaaggttttcacgctgcggtaattgaggatgaaaaacacgcaaagcaggccgaactgcaccagccagcccagggtggtcgggtcgctggaaccggctttggtgagctcgggaaaccaggccgctgcgtattggcgcgaggcgaccacttcaatcgccaccaggctggaaaacgcaatcagcgtgataaagcccatcaaatagccgagcagcgggccgtgggagtacaccggataacgcaccacaccaccggcacgcggtaatgcggcgcccaattcgcagtagacgatgcccaggagcaacacggcgaaaccgccgatcaaccacgagatgatccccgccgggccggcaattgcggacacatggctggccgcaaacagccagcccgaaccgaagatggcgcccaacccgataaaggtcaggtccatcagtgaaagttgcttcttgaacttgccttgagcagacatggcggcgccttcttgtgagttattagataggcatgcagtggcgctatcctgacccgatcaatggcgcggcgattgatgttttgcgccggtgcggatgacgaattcagcacagtgtgccgcgctcgacagggccacgggcattgggcaatctgcacagaaaaaaggagccgacgtgatgttgcaaagcgcatttgcgaccctttgccaggggcgcgagggcagccgccccaacagcattgagcagctattggcaggggtgatgcagctgctgccgatgctcgacgtgatccccaatgctgcgatcttcatcaaagacatcgacgcgcgttacctgctcgccaaccgcaccctggtccagcgttgcggcctcaagcagttgcaaccgctgctcggcaaaaccagcgccgaagtgtttcccgcccaattggggccggggtataccgagcaggaccagcgtgtactggagggcgggtttgtattggaagaccaactcgagctgcacctctacggtacccgtgagcccggttggtgcctgacacataaatggccgctgtacaacgatcaaaaccacatcattggccttgccggcatttcggtcgatttgcaatcggccagtgaaacccacccggcgtatcagcgcctggccgcggtggatgagcacatccgccagcatttcaaccgtcgcgtcactctgggcgagttgacgcgcatcgccggaatttccgtggcgcaactggagcgttactgcaagcgcgtgttccacctcacaccccggcagatgatccagaaagtgcgcctggagcacgcacggcgattgctgcactccgagctgccgatcactgaggtggcgctgcaatgcggttacaccgaccacagcgcgtttacccgccagttcaaggcgttgaccgggtttacgcccaggcaataccggcagttggagtaacgggccggattgcgatgcaacgaatcgccgccgttgcccctcctatgcttacgaatgatcttttcacaagacaggtagtgggcttatgacggcgacggacaacgatcatgtgaactggctggttgagcaatcgatgttgcacgcggcacgccagcgcgcccggctttattcggggcaagggcggttgtggcagcagccgtatgctcagacccggccgcgtgatgccactgcgttgtcgtccgtgtggttcacggcgtatccggcctcgatcgtgacccgcgaaggcggtacggtgctggaagcgttgggcgatgagcgcctgtggcacgcgttgtcgaaaattggcatccagggcattcacaatggcccgctgaagaagtccggggggctttgcggcactcggcatacgccgaccatcgacggcaactttgaccgcatcagctttgaaattgacccggaactgggcaccgaagcgcagctgcaggcgttgacgcgcatggcggcggcgcacaattcggtgatcattgacgacgtgatcccgtcccacaccggcaagggcgcggacttccgcctggccgagatggcgtatgaggactatcccggtctttaccacatggtggaaattcgcgaagaagactggccgctgctgcccgagggcgccgaagggcgcgacgcgcagaacttgagccccttgcaggtcgatgcactgcgtgacaagcactacatcgtcggccagttgcagcgggtgatcttcttcgagcccggcgtgaaggaaaccgactggagcaccacccccgtggtggtgggtgtggacggcaagccacggcgctgggtgtacctgcattacttcaaggaaggccagccgtcgctgaactggctggacccctcattcgccgcacaacaaatgatcatcggcgacgccctgcatgccatcgatgtgatgggcgccaagatcctgcgcctggatgccaacggctttctgggggtggagcgcaaacttgacggcacggcgtggtcggaaagccacccgctgtcgatcaccggcaaccagttgctcggcggcgccattcgcaaggccggcggcttcagctttcaggagttgaacctcacggtcgatgacatcgcttcgatgtcccacggcggtgccgacctttcctatgacttcatcacacgcccggcctaccagcacgccttgctgacgggagacaccgagttcctgcgcctgatgttgcgtgaaatgcacagccagggcatcgaccccggctcgttgatccatgcgttgcagaaccacgacgaactgaccctggaactggtgcatttctggaccttgcacgcccacgacaattacctctatcaagggcaaaccttccccggcaacatcctgcgcgaacatatccgcgaacagatgtatgagcgactggccggtgagcatgcgccgtataacctcaagttcgtgaccaatggcgtgtcttgcaccactgccagcatcatcacggcggcgctgggtgttcgcgacctggaggcgatcacggcggcggatatccagcagattcgccagatccatttgctgttggtgatgtacaacgccatgcagcctggggtgtttgccttgtcgggttgggacttggtgggcgcgctgccgctggcggcgaatgaggtcgcgcatttgatgcaagacggcgacacgcgctggatccatcgcggcgcatacgacttggtggatttgaacccggatgcgcaggtgtcggcgggccagatgccgcgctcgaaaaccctgtacggcagcttgaacagccagttgaaagacccggagtcattcgcctcacagttgcagaaaatcctcgccgtacgcagtgcctacggcattgccgccagccgccagattctggtgccggatgttgagcatccggggttgctgatcatggtccacgagttaccggccgggaagggcacgcaaatcaccgcgctgaattttggcgccgccccgattacggaaaccctgcacctgcccaatattgcgccggggccagtggtggacatcatcaacgagcgggtcgagggcgatctcaccgccgaaggcgagttcaccatcacgctcgatgcctatgaggggctggcgctgaggatcgtgagcaactcaccgatgctctgagccgaaggtcgccatggcggcatcaatgaagctgcgtagcttggcggtgcgctggcgatcggcgggatagatcaggctcatgggtttggatggcccttcgtagcccggcaatacgcgcaccagttgcccgctggccagcgcgggtgcgagcgagtcgagggccgccatcaccacgccgaaaccggcaatggcggcttttagttgcgcgtcggcgctgttgacccgcaaacggctgccaacctgcaccgggtagcttttgccttggcgggtaaaaatccattccttgttgatcacccggtcggcgaagacatagcccaggcacgaatggctggccaggtcgctcggttgcacgggcgtgccgtgtgcctgcaagtaggcgggggccgcgcacaccagcaattggtaagggcgcaaggggcgtacgaccaggctggtgctgtcggccaggccggggtcgccgatgcggaatgccgcttcaactccttcggcgatcaggtcgacatagcggtcggtgaggtccaggtcgatctccaccaatgggtgctgagccaggaattgattgatcacgggcatcaggctttgtgcaccgaagttctgcggcgcgctgatcttcagggcgcccatgggctgggcgtgagcctcgagtgccagtgcgtcggcagcctcgacgtcggccagtagccgcacgcaacgctcatagtaggcgcggccgaactcggtcaactgctggcgccgcgtggtgcggttgagcaggcgcacttgcagctgttgctcgaggtgctcgacgtagcgcgcgaccatctgcggcgacagttccaatgcagctgccgctgtggcgaacgaaccggattcggtggcggtgacgaacacgtgcatggcgcgaagcttgtccatcaatcatcactcctggttgtgaatgctttcatcgcaggtcgatttatctgaatcaaggtggtgaataagctagcaccttttccaggagaccttcgatgagccagccagaaatattccaggacattgcccgcactcggcgtgtgacccgccagtttttgccgacgccgttgaccgagcgcgaaatcaaccgcgtgctgctcgacgcccagcacagcccgtccaactgcaacacccagccttggcaggtgcacctggtcagcggcgaaacccgcgaccggctttccattgcgctgctggccgccgacgaccgtcagcacttcaccccggatttcgagttcgacatggcggcctacaccggcgtgtatgccgagcgtgcacacgccagtggccgtgcgcgttacgaggcgattgatatcggccgtgatgatcacgccgcccgccaagcctgcctgcgccacaacctgaagtttttcgacgcgcctcatgtggcttttctgtttatgccgcagatcagcgattacgtgcgctcggcaggggatatcggcatgtatgcgcagacgttcctgttgtcactgcacgctcgcgggtacggcgcgattccccagaccttgctggggatgtacgccgacacggtgcgcgatgtgctgggggtgagcgccgagatgaagttgatgttcggtatttccttcgggcatgccgacccgcattccgcatcgaatttcgtcgaagtcgggcgggtagccctggaggacagtgtggtgcggcacagctgatcgcatggaataaacgcggcgccgaggacgttcctacagtaagcctttcagccgccccggagcgcagcattcatgaaccctgtcgaatcacttatcaccgaacaagccctcaacagcttctcggccgccccggacccgcgcttcaagcagattatgcaaagcctggtgcggcacctgcatgcgtttgccagcgaggtcgaattgaccgagcaggagtggttcgaaggcattcgttttctgaccgacaccgggcatatgtgcgacggttttgtgcgccaggaattcatattgctgtcggacaccctcgggctgtcaatgctggtggatgcgatcaatcaccggcacgttgccagcgctaccgaaaccacggtgttcgggccgttctatatcgacggcatgccggaacgcgcctacggcgaaaacatggcactgacgccgggtgaggccacgctgatccaggggcgggtgctggataccgagggcaaccccttggcgggcgtgttgctggatgtttggcaaaccgccggcaatggcatgtattcagggcaggatgtcgatcagccggtgggcaacttgcgcgggcgttaccgtaccgatgccaagggcgactttgcgattcgcacgattctgccggtgtgctacccgatccccactgacgggccggtggggcacatgctcgaggcggccgagcggcacccgtggcgcccgggccatgtgcatttcatgctcgaaatgccggggtatcgcaagctggtcacgcacttgtttaccgaaggtgatccgtaccttgaatccgatgcggtgtttggcgtgaagcaatcgttgcaggtggcttatgaggatcggaccgctcacgatgctgtgtctgccaaggtcggcatggcgttgccgttcaagcgggcgtactacgattttgtgctggaaagtgaatgacgggtgtgcaacaacacttctttcaggcactgcgcagcgggcgtgagcgcgcggccggcgctgctgagaaacacatacacgggcggcagcggtaccaacgcttcactcagggcgatggtgcccaagcccgccggggcactgagtggcgtacgcaccgtgatccccaaccccgcgtttaccgccgcccacagcccggacacattgggtgtggtaaaggcgatttcccaggggatgccggcatcatccaatgcgttgatggcggcagtgcgaaagaagcagggcgcctccagcagtgcaagctgcaccggttcaccggtctggagtgtgtcgcttgggcggccgatccaggccatcggcaacgtcgccagaatttgcgcctcgataccgactttgccgctcaataacacggtcaggtcgagctggcccttttccaggcgctcggtcagcgcggcattgcggtcgaccatggcttcaatgcggatgttggggtaggcacgtttgaactgctcaagcacgatgggcagccaggtgtgcgcgaagtcggcggaaaaaccaaaacgcaccacccctttgactttgatgccgcctagcacggccacggcttcatcgttgagctcgatcatgcgttgggcataagtcagcaggatttcaccggcttcggtcagcacccggccccggccttgtttgcgaaacagcggttggccgatgcggtgctcaagcttgtgtatttgctggctgacagctgactgtgagcggccgaccttgtcggctgcacggctcatggcgcccaactgatctgcggcaatcagtgtgcgcagtacatccaggtcaagatcgatgggcatgggattctcttgtgtggggaaccgccgtgtccctggcggctcactggatcagtgggtgcgcacgtaagcgatttcgccgtaaacgcccggcccgccaatcgaagggtgcggcacggtaaaggtcgcgtgcgcggtatcgacggtgtacggccaggtcaggttggcgccttcccaattggcgtaggtggcgtgttccacatgcagggtaatggtgtggtccttctcgttgacggtgtaagtaccgaagtggcactgcgtgccgacgaccgtggcgcggtattcctcgggcgtgcctttgctcttgtcgttggcggcaaatgtggggcgaactttgctcatgatctgcaaggcgtagtggccggtggcatcgaagttcagcgtgccttgcggatcgtcgccgtagaggtgaatccggctgccgtccgggttgacgttgtctgacgcggtgagcgtccaggtgcccagcagctgttgattgtccgttgaagcgtgtgccggtaaagccaggggcagcaggcaaaccagcaggccgatcattttatttgcagtactcatgtctctctccaactcatggggtgattgcgcagcctgagcctagcaatggcacccccggcggactaacgggtagttcgaaggtgagactttcgtaaaactgaaacctcagacgttgagcgcgagacggttcaccaattcggcggtggttacaattgaatgggcgtaggtcggcccgttgaggtcgtgggcggcgtgcatcaactcggggctcagcgcggcggtggcgtcgcgcaccagcgtcacgtggtaacccagttccgctgcataccgtgcggtggcttcgatgcaggtattggccaacagcccgacgatgatcacgtgggtgatgccttgctgcttgaggcgaaagtcgaggtcggtgttggcaaaaccgctggagccccaatgttcttgggcgacgatatcaccgggttgcggtgcgaaatccgggtgccattcgccgccccattcaccccgggcgaaggtctgcgcgttctgcactttgcgctgggtgggggtggggtgggcccagtgatcgtagtcgccttgctcccagcggcggtgcggtacaatcgcgacctgcaaccctaagccgcgcacggttttgtcgagggtgcgcaggttgtcgagcaggtgtacctgttcggcgatgggctggatgtgcgggaagactttaccgccttgcgagagaaaatcgttgtagggatccaccagcagataagccgtgcgatcgaggggataggtgaaggtcgtcatggtgatctctccaagggcataaaacagcgcggggcaccgtgccgcattatgctatgttaatcatagtaacgttcgtgaggcaacgtccgtatgtcgttgaagaagaaaactgcgcctgacaccctgtgcccgatttcccgcgccgaggaaattgtgggcagcagttggaccgtgctggtgctgcgcgaactgtttatgggcaaccaccggttcgacgaaatccagacccagagcggtggcacgccgcagatgattgccgcacggctcaaaagcctggaggcagacgggatggttgcgcgccggccttacagtgaacggccactgcgttacgagtattttttgaccgagaagggcgaggggttctactcggtcgtgctagcgctgcgggcgtggggcgagacctggtgcaaagccgaaggcgaggagcgggcggtcaactacactcactcgctctgcggccaaccggcaggcttggggccgctgtgcgagcattgtggcgagctgttgcgccggggtgagctggtcagtgaaccgagtgccggctatgtgctggagcgccaacagcggcgtgaagggacggcgtgatcagcgcaagccgtcggcaatgcctgcggccaatagctcattggccaggcgcaggttgcccggctggcgtgagtgcgtgagccacacgcccattttcagctggaaatcgctgatgtcgacgatggccaactcatcggcgtgggcgatgcccggcagcaatttcgccgggatcagcccaaggcccatacccgccgccaccatgcgcatttgcaccgaggcgccgtgggtgtccacggcgagtttcagcgcttgcccctggccgcccatcgccgcctcaagcgccgcccgatacccgcaacccttggggttgagcacccactctgacgcggcgaggctgttgatcgcggcgggcgtgctgaccagcgggttacgcttgctctgcaccacgagaatgtcgagcgtggtgatcaactgagccgccagggcgctgggcgggctgtgggcggccgacagcatcagggtcgccgcgtcgagttctcccagcagcatcagccgctcaagttcagtgctccagtcggtgatgacctgcagttcaaggttgggcagctgttcgcgcatccgcgtcaccacgtcaaacaccacggcgtctgcgacgatctgagtcaaccccagccgaaaccttccgctgggcgtggcattttccttggggatgctcagcaggtgttcggcgtctctgagcagttccacggccttttcatagatgcgatggcccatggcagtgggtactggcgggcgcgtggtacggtcgaacaaggcttcgcccagggtttcttcaagatgctgaatacgccgagacacggccgattgggtcaggcacaacgtgtgcgcggctttggtcagcgaggcgctttcgatgaccgtgacaaaggctttcaagtcttgaaatagcatgcgtaatactcatcatcttttcgaaaattatgcgcttgatgaatccttgcgtcgagactagcgtaataccaccggccgccgatgtggatggccactgacccgtcaaggatttttgccatgcctttagttcgaatcgacctctctgccgacacgtccgttgaaaccgctgccgccatcggcgacgtggtgtacaacgcgatgaccgcggtggccaatgtgcccgagcacgacaaattccagatcatcaaccgtcatgccaaagacgaattggtgtacccggcggctggctacctcggcatcaattacacgccgaagattgtgttcattcaggtgacctggaacgccgggcgcagcattgaggtgaaaaaggcgttttacaaattcattgccgacggcatccacgccaagaccgggctgcgcaaggaagacgtgtggatcagcctcgtcgatgtgaagcgtgaagactggtcgtttggtaatggtgaaatgcagtacgcgcctaccgagtgacttgacgcatggaaaaggggcgactcatggctgagtcgccccttttttattgggctgcgttcaaggtttcaaggaactgcgtgtgtttcagcgtttgggaaaacatcggcagcgtgaagttttcggcagcgtgttgctgttcatcgctgaaggtggccgtgcagtcggtcagggtgaccacgtcgtagcctttttcgtagcctgagcgaaccgtgccttcgacgcagcagttggtcaggaagcctgccaccaccaggttctggatgccgttgttgcgcagcaccaggtccaggccggtggtggcaaatgcgtcgagcccgcgtttgccctcgatcacgatgtcgcccgggccacggggcagggcgtcggtgatttcggcgccccaggagccggcgcggaacgcgttgccgtcggccacgcctttgaggatgccgtaggaacgggtggtcagctcggggtagccatcggcaaagtggatcggcatgtgaatgatcgtcacgccgagcttgcgcgcctgttccagggtggcggcggtgttggccagcatgttggacgtttgcatcacgcctttgacggcgtcgtggaacacgccgccttcggtggtgaagtcgttctggtattcgatcaagacaatcgcagtgttatgcgcgtgcatggtggctctccgaaacgttgggtgagtcgttgttgccttctatcagggcgacgctgtaggtcgcacctttgaaacggtgtgcggcagcggcctgatacgccgggctgtcgtaccaggcgcgggctgctgcggtggtgggaaactccagaatcaccacgccttctgcctgcgcaccttccaaagcgtgtggcgcagctttgaccaccagcttgacagggtagccgttaaaggtgtcgccgacctggctttggtagcggtccaggtgggcctgatccagggttttttctttggtgaatacgataaacgccggcatatcagtagctgtccggcgtgggcgcgttggcggcgataaacccttgggccttcatggcctgccagaacgccgcaggaatgatggccttgatcgcctgcgtgtcttcggtgatgcgcgaagggcggctggcgccggggatgacggcggccaccagcgggttggccagtgcaaattgcagggccgcggccttgatatcgacgtgatgcagttgtgcaagcgcgtggattttcgcgaccttgtcgagcatcgcagcagaggccggttggtactcgaaatgtttcccgcccaccagtacgccggagctgtacgggccgccggcgacaaactcggcgccttgagcctgggctttgttgaacaggcgttgcagcggttgctcgtgatcgagcagcgtatagcggccggcgagcaggaacccgtctggctgaaattcttgcaggtccagcaacagttcgcagggttcaacacggttcacgcccaggccccaggctttaatcacgccttcttccttcagacgtgtcagcgccttgaacgcgcctttgcgggcgatggcgaagtgttcgatccattcatcaccgtgggtgtcctgggccacgtcgtgcacgaacacgatgtccaggcggtcggtgcccaggcgttgcaggctgctttcgatggagcgcaaggtggcatcggcgctgtagtcgctgagcattttgttcggattgccttggctgaacggccccgagcctggcgtggcgttgagttcatcggagaccaggcgaccgaccttggtggaaagcgtgtaggcatcccgtgggtgatgggccagggctttacccagccgggtttcggacaggccggcgccgtacaacggcgcggtatcaaagaaacggatgccctgatcccacgcggcagcaacggttgcggcggcttcatcttcgtccagggtgcggaacatgttgcccaatggcgcggtgccgaagcccagctggccgataatcttgtcttttaagctcattacgttttctctgtggtgaggtgagtggttactgctgtgcaacctggttttccagggtgccgattccttcaatcgtgatgcgcacgctgtcgccagcctgcaaaaagcgtggcggtgtgaacccgatgccgacgccgacgggcgtgcccgtgctgatgacatcacccggcttgagctcgatccccgcagacaggcattcaatcagcgcgggaatatcgaaaatcaggtctttgacattggcttgctggcgcagctcgccgttcacccagcattcgatcgtggcgtcctgtgggttgaattcatcggcgctgaccatccacggccccatcgggcagaacccgtcgagggacttgccgaggaaccactggcggtggtctttctgcaggtcgcgggcggtcatgtcattgatgacggtgtagccccacacgtgagcgtaggcgtcttcgcgggaaatacccttaccgcccttaccaatgatcacgcccagttccgcttcatagtccagttggtgggtgaccttggcgtgcaggggaatcggggcccggtggccaatcacggtttgcggggttttggtgaaaatcaccggaaactccggagcgatttccccgtctttggcgctgtgatcgaagccggacttgctgaattcggcggcgtgagcgtgatagttcttgccgacgcagaagatgtttcgcgcaggtgtcagcggtgccagaagcgtcaccccttcaagcgaagtgccttcgccgtgtacggcaagccctgccttgagttcatcccactgggtaatcaactcctccaggctgccggaaaacggcgcggccaggtgtcgcaacggccagtattgttgtttgtctgcatcgataagcgtgggcacagactcgccgctggcgctcagaatatgggtgaatttcatggctaaacctcgacatggaccaggcggcgggtgagtcgcccatgggaggttgaacatacatgattggaaacatctataaaatagagtttggttggaatctattaatgcctgactgaagcaaaactgaagtatcgggttgagcgggtcagggcgatgaatccgtacgccttgtcgagaaagactcaagcgactgaactacgcttgcacctgagtgatcgtagtgcggtcattaaaactatcaacggagcgacatggacaagcggcttgcgggactgtcatttctgctgacgctcggctgggtgaccgccgtggcatttgtgatgtggtttttcggaaagacttgaggttggcagaacgccggaagaagggtcgttgcgaagcgcaaacaataaaggcctgcatgagatcactcatgcaggcctttgatatgtatggtgcccgaagccggaatcgaaccggcacgcccttacgagcgggggattttaagtcccatgcgtctaccagtttcgccattcgggcggtagcgcggtgaagcagggttgggaatatatagacccaggcgcggggatgcaaggtcgaaagcgcggtttatcacaggcttgcaaagctgaaaaagcttgcaggatcagtcatctacacgggaaacctggcgcaatggcgaggtttttgccgcccacggcacgctcctgccaggaactgacaagggtctgacttagagtggtgtttcaccccttgatcaggtctctttatgaaattcgcctctgttcgtctcgtcacccagcaatttgagtcactcatccagttctatcaaaacctcttgaccgttgagcctcggcacctcgcaccgggttttgcgcaggttcacgtcgatggcctggtgctggccatcagcgacgagcgcttgattggcctttataacaacggcttggctgttgcggccagtaaccggtcggcgatcctggagtttcaggtgggcgatgtggcggctgtgctcggtcgggtcagcagcgcggcagtcgcaatgcccgtgacgaaaatgccgtggggcaatacgtccgcgctgctccatgatcccgatgggaacctggtcaatattttttctgtgcctgaataggccggaccgtcaaacgaagggctgcccgctgaaaccccgtggcaagcgctgcaacccgggcaagtcagtcaggcgttgcgtccacgcactgcgccagtcggcggcggtgtgggtcttggcttttcgcgcggcgcggcgcgaggcattgcgctgggtacggcgggcttctttataggcttcggtattgcggcaggtgcggcacttgacccggttcagctcggtgctggaggtgaggttattgccgtggtggccgcaagccagatgcccggcgaccttgaagtgagtgaccatgtaagcgtctccttcttatgggggtacgcgcactcgccagcaggcgacacgcgtgagcagggccgggctgtttagccccggcgccttatggttgtgaccccacgcaccgcctggcgttcggttttattcccgggccggttcgcgttaccctgtgccgcgaaaaatcataaaaaaggaatgaatgatgagcattgaaaatcagccgctggaaggcagttgccggtgtaaccgggtgcgtttcagcgtgagcttgccgcctgtgatcaccatggcgtgccattgcagcggttgccagaaaatgacctccagcgcgttctccctcagcgcgctgattcctgccagcggcttcacggtgacccagggctgcccggtgataggcgggctgcacggtgtggatcgccattactgctgcccgcactgcatgagctggctgtttacacgcccccatggcatcgacgaattcgttaacgtgcgtgcggcgttactggataacgcgcaagattacgtccccttcatggaaacctggaccagcgaaaaactgccctgggcgaccaccccagccgtcgaaagctttgaacagctgccccaaccccaggacttcccgcgtctgatgcaagccttcgcacagtcccgcgcgcgctgaattcagtcaatcagtgccagcaggtcggtatcgcccacatccacccccgcctgggtcagcaacgtcgttgcctggccccggtgatgggtctggtggttgaaaaagtgcaccaacaggccgaagaagggtttgtcgtttgcgacgccacgcatgttgcggtagtgcaggcggtggtccaggtctgattcgcgcaggctgtaagcccattcgatgatgagcgggtccagccaggcgcgacgggatgaaagctcgcggatatccacgaaggctaattgcttgagatttgttggcgtctcgacagcgtttagcgcgctcaataccgggaagcctgccgggtgcgtggcgaagcgtttgagccagaccgtatcgcccagcaccagatgattcagcgtgccaaggatcgagccgaaaaacgcctgccgatcttcgaccaactgcgcggccgtcagccggccggcagcgtcgtagactttgcgattcatccactggttgtagtcggccagcaaccggatgtgctcgatgcgattcacctgatgcctccctcaaagacgcgatgacgccatcataagccgtgcccgcccggcggtcatggtgttcccgtgggggcgggctatggttgtttaacgtcaatactgtgcccaggagggtgacaccatgaacaccagtgatctacttgaacaactgttgcgcgccgggcagcaaggcggcggtgcagcaggcggtggcctgggcggcctgctcggcggtttattgaaaggtaacagccccggcactggctcggcgggtggcggcctgggcgggttgctgggtggcctgggcgggttgctcggtggctcacccaccgccagcccgacgcagggacgttccggcggcatgaactacgccgcgttggcgtcgttggggatggcggcattccaggcctatcaggcctggcaacgccagcaggccagcgcgccgcagcaagcgatccagacggtcgaccagcttgacggccccgaagccgaggcgcacagccatggcgtgttgcgtgcactgattgcggctgccaaagccgacggcaaaatcgatgagcaagagcagcaaatgatcagcgcagagattggccgccataccgacgaccctcaattgcagcagtggctcgatgctgaagttgccaagcccctgaatgccgcggatttcgccgagtatgcaggcgaccccgcgttggcctcggaggtctacctggccagtgtgatgctggtcaatgaccagcagggcgcagaacgcgattacctggatgagttggcggcgcagttgcagatcgacccgcagctgcaactgcacctggaacagcaagccaaggcttaaaagcgcagggttgcgccggtggccagccattggttgcggtcgccggtaaggctttgccctgccaccacatccacatcaatcagcttgcccagatggaagcgcggcccggcttgccacgcctggtcgccaccttcctggccatagcgctcaccgatcagcgtgagtgcgtccgccacctgatactcaaacccggtgccccaggtcagtcggtgattttgctcgccaccgttgtaggcatgcgtccagccgccgttgaggctcaggcgcaacgcttgcacgggttgccaggtcagcgggatgttcaagtccgcgccgtcgaacgcgtgttgtcggtccagcgcgaaatggctggtgcccgacaccgccatttgcagccccaggtcttctcgtgaccaaatctgcgccttcacctgcgggctgacctgggtttctgctgcgcccgcattgctggcgcgggacagcgcagcgctccattgcaccgaaggcagtgcactgaacgtgcacgccgggttcagggtttgattgtgaacgttgccgtgatgccggttggcggtgtaccacgcatccacattgcattcgcccgggtcgttgaccgcgccgtcatcgaccgtataagacccgccggcggcataggccttggaaaacacggcaacgagcaaaataaagcccagggtcacgccgatgaaaatcaaattgcgttgcagcgcgcggcgtttggccggcggcagcagcaacagggtatggcgagcgccgcgatagtgacgcgcgcggtatttggcaaacccgtccttttgaatcggggtatgttttttgtgcatgatgcacctcgcttgaattcagctttctacggtcagcaccgaaatgccgctggctttggcctggcagaccagctcggatgtgtcctcaccacccggcagggcgatgaccacatcggggcgactgtcggccagcatgaaatggttgcgttggcgttctgcctgcttgccgtggcgtttccagttgggcgggtagcgcaccacgtcgatgctcatttcccgcgcccattcctcgatgtcgctgcccaggaactggttgccgccgtggatcaaaacctgcaccgggcgcaggcggtggtaggcgtccagcacttggcgggactttttggtgtcggcgtaatgacgacctgcacagatcagcacgcgcatgggtcaaatccttgtagtgcacggtgacggccgggcggccgccaccgtttgaacggcggggagatcagtaccactgcttgaagcggcggatgtagatcgtcttcatcagttgggccacacagcagtaagctagcagggtgcccaccagccacgggaagtacgccagcggcagcggttgcaggccgaccagcgtgcccaatggcgagaacggtacgtagatgcccaaaccgatcaccagggcagtcatcatcaacaccggccaggcggccgtgctctggaagaacggaatcttgcgggtacgcaacatgtgcaccaccagggtttgcgacagcaggccctcgataaaccagcccgactggaacagggtctgcatttccacactgttggcgctgaacacgtaccacatcagcgcaaaggtggtgatgtcgaagatcgacgaggtcggcccgatccagatcatgaagcgcccgatgttcttggcgtcccacttgcgcggcttggccaggtattccttgtccatcttgtcccacggcaatgccagctgggagatgtcgtacatcaggttttgcagcagcaggtggatcgacagcatcggcaggaacgggatgaacgcactggccaccagcaccgagaacacgttgccgaagttggaactggcggtcatgttcaggtacttcatgatgttgccgaaggtttcgcggcccttgagcacgccttcttcgagcaccatcaggctcttttccagcaggatgatgtcggccgattccttggcaatgtccgtggcagtgtccaccgagatacccacgtcggcatcgcgcagcgccggtgcatcgttgatgccgtcaccgaggaagcctacggtgtggccgttggcttgcagggctttaagcacgcgggatttctgcagcggcgtgagcttggcgaacactgtgcgttcttccacgcggcgcatcagcgtggcgtcgtccatggcctcgatttctacacccagcagtggctggccgggctccaggccgacctggcggcagatcttgctggtgaccacggcgttgtcgccggtcagcacttttacggctacgccgatttgttgcagtgcagcaatcgcagggcctgcggtttcctttggcggatccaggaaggtcaggaagccctggatcaccaggttgcgctcatcggccgtggtgtactgctgacgggccagtgctttagggatattgcgtgtggcgaccaccagcacgcggaagccgtcctcgttgtagtcgttggccagggccagcagctcgtcacgacgccgatcatccagcggcacagcttcgccggcttccatcatgtgggtggaaatgctcagcatctcttccacggcgcccttgcacaccagcagttggtcgccggcagcgtccttgaccacgatcgacaggcggcggcgtacaaaatcaaagggcaattcatcgaccttgctgtaggcaaacggcacctggaacttcgggttttgctctgagaactgcaccaccgcctggtccatcaggtttttcatgccgctctggtggtagctgttcagccaggccagggacagcaccgcatcatcgcgttggccgagggcgttgacgtggtgttcgaggatgatcttgtcctgggtcagggtgccggtcttgtcggtgcacagcacgtccatcgagccgaagttctggatcgcgttgaggcgcttgaccactactttgcgcttggccatggcagtcgcgcccttggccaggttggcactgacgatcatgggcagcatttcaggggtcaggcctacggcaaccgccagggcaaacaggaaggcatcgccccagtcgcctttggagaagccgttgagcaggaacacaatcggcaccatcaccagcatgaagcggatcagcagccaactgacactgttgacgccacggtcgaaggcggtttgcacccgcgagccgacaatcgccttggccaacgagccaaagtaggtgcgcggcccggtggcgaccaccacggctttcgcccggccgctgaccacgttggtgcccatgaagcagatgttcggcaggtcaagcaggttgccctggtcggccgccatggaagaggcggatttctgcgtgacgtcgccgagggtgtcgtacttctccaccggcaaggcttcgccggtcagcaccgcctggctgataaacaggtcgcgcgactcaatcaggcggatgtccgccgggatcatgtcaccggccgacagctgcacgatgtcgccagccaccagctcacgcatcggcacttcgcgcagggtcggctggccgccgacttgctcgcggcgcagcacggtggcggtggtgcgtaccatggctttaagcgcttcggcggatttggccgagcggtgttcctgccagaaacgcagcaggctgctgagcagcaccatggtcatgatgatgatgactttggtcgggtcagcgtcttcgcctgcctgcatcggcagccagcaatcggtgacaaagctgatgccggcgagggtcagcaatacgtaaatgaaggggttgttcagcgcctgcaggaactggacgatggcgtgaggcggcttgtcgtgggccacttcgttgtaaccttcgcgtaccaggcgcgccgaagcgtccagttcggtcagcccgtcctgggtggcccgtacgttggcgagggtggccgacaggccgttctgggcttcgcgggcggcacgcatcgacagtttggtgtcggtgtcggtgccatttttcttgtgcagtggcgtgttttttacggcgctcattgtctgtactcctgtcgccaattctcgacaaaacatacccggtacttacctgaatacaggcgagcgaaagcatgccgagccgcggacttcgcgatcggtttaaataagtaatcacataacttctacagtgcccgctgctgacgcgttaattaactggcgcgcagcgggctactactggacttgttcataaagaactccagggtatttattgggaagttgctgtttccagcgggtttaggcagcccgggcgttcacgtacaaggcgaacatcaggctggcttgagccagcatggaaacgttcggtctctgcgggtcttgagggtcggcgtggtcccagtgttgcagcaactggccgctgtcagggcagacacgccagtgcgccagcgggggagccgggcgcacgtggagggagggtgcagtaaaaggcgaacgggcaggggaaaagcctgcgggctcgcggcacagcttggcgcgcaaggctgcggccagtgtacggatatcgggcaaagcaaggatttgaagggtcataacacacctcgggaccggacgggcgtccggcgaggcagttacggtggagcatcaagctctagcgcagcttaccggaccggggaggcgagtcctgtcatattctgggtttggcgcccgatgcccgcaaacgcggtgctcggacagcgactagatactgtgtccattggcttcttttgtgaggtttaaaaaaggccccagttgcgggcaggggcaatctactcagaccgttacaaaatgtcaacgcatgattaattaaaatcaccggtgttcagagtttattcagacaagctgcatgaacaagttgtcggcgatatataacttcatatcccctgagcggccagaacagcaagatataacaagaccactccacaggtgccgtagctgatgcgctgccacacgggtgaagcattcttgcgcaacagattgaccaaggctgcgatcaggaaacaggacaacaccgacgccagcataaagcctgcgaaaaacatcagggtttgcccatggctcggcgtggcgccgacgatgccggacaaggcgctgcccagggcgccccaataaacgatgttcttcgggttggccagggagatcgctgcgccgactgccaacgcgttttggccggtgcccgccggcgcatcgtcggcctcgggcaattgccaggcgtcaatcaggctgcgcacacccagccaggccaggtacaaggcacacacaatggtcagcggcacgcgcaccgtatcgtgctggatcagcagggcaataccggtaaggccgatgactgcccagaccgcatcgcccaccagcgagccaaattgcaccagcaacgcaggggtgaaaccgtggagcaaaccccggcgcagggtttcggcgagcaccgcaccgggcgagaggcaaaacacaaaaccgaataccagtgcgtagaaaaagatcgtcaacatgcccgcgtcctttcgagaaagggcaagagcatacgacgactcaggtcatcagatcgaccgttgattgacgcgctctgacagtgcgcctgcgctttccttgcgctccgaatagcggtccaccagatccgggcggtcgcgcagcaacagggtgaacttgaccagctcctccatcacatccaccactcggtcatacaacgccgaaggcttcatgcggtccctgtcatcgaactccatgaacgctttgggtaccgaggattgattggggagggtgaacatgcgcatccagcggccaagcacgcgcaattgattaaccgtgttgaacgattgcgaaccaccggacacttgcatcaccgccaacgtcttgccctgagtggggcgcactgcgcccgctgccagtggcacccaatcaagttgggccttgaacacggccgacatagagccatgacgttccggtgaacaccagacctggccttcggaccattgcataaggtccaacagctcccgaaccttggggtggtcggcgggcgcatcgtcaggcaaaggcagcccagagggattgaaaatccgcgtgtcggcaccgaagtggcgtaacaggcgcgccgcttcctcaaccagcaggcggctgaaggagcggggccgggtggagccgtacagcagcaggatgcgcggcgcgtgagccgggcctgccggcagtggcgttatcagggtggtgtcgaggttgggcagggtcgtcatcggtttctccggttacagctgtgcgatgcggtcgagttcagccttcagttcgacagggccgaggcgggcaaagggcaacgcgaaaaacgcctggcaacgggaggcgataatgcccagggtggtgttgaacgcagcgttgagccttgcttcgtcgccctgaacatcggagggatcttccagcccccaatgcgccttcagcgccggcccgaaatacaccgggcacgcttcgccggcggccttgtcacacacggtaatcactacatccggcgggttgccctcaaacgcgtcattccccttgctgtacaacccttcggtgctgataccggcttcgcgcaacgtgctcaggctgcgaggcaagaccacgcctttgggaaaactgccggagctgatcgcctcaaacccgggcggcgcgaggtggttgaacacggcctcggacaagatgctgcggcagctgttggcggtacacatgaacaggactttcatcggcgtatttccttcagatactcaggcgcagggcgagggcggcaagggtgatcaacagcaccggcaaggtcagcacgatgccgaccttgaagtagtagccccacgtgatggtgatgcctttgcgcgccaggatgtgcagccacagcagggtggccaggctaccgataggggtgatcttcgggccgaggtcgctgccgattacgttggcgtagatcatcgcgtccttgaccacacccaccgcatggctggactcgatggacagtgcgccgatcaagaccgtcggcaggttgttcatgaccgaagacagtagcgccgtcagcacgccggtgcccatcgccgcgccccacacaccatgcgttgcgaaggtgtccagccaggttgcgaggtaggtggtcagcccggcgttgcgcaggccgtagaccaccaggtacatgccgagggagaacaccacgatctgccaaggggcttctttgagcaccttgcgtgtggaaatcttgtggcccttggcggcgatcaccagcagcaacacggcgcatgccgcagaaatcgcgctgatgggaatgcccagcggctccagggcaaaacagccgaccagcaagatgccaagcacccaccagccggcgcggaaagtggcgcgatcatgcacggcgctggccgggtcttcgaggtcggcggggttgtacgtccctggaatgtcgcgacggaaaaaccacaacagcacagcaagcgtcgccgcgacgctgacaaagtttaccggcaccatgacggcggcgtattcgttgaagccgatcttgaaatagtccgctgaaacgatgttcaccaggttcgacaccaccagcggcaggctggcggtatcggcgatgaaccctgcgcccattacaaacgccagggtcgccgccggcgaaaagcgcaacgccaacagcatcgacatcacgataggcgtgaggatcaacgccgcaccgtcgttggcaaacagcgccgacaccaacgcgcccagcaacaccatataggcaaacagccggcgaccgtgcccccggccccagcgcgccacatgcagcgcggtccaggcgaagaagccagcctcatccagcagcaggctgatgatgatcagcgcaacaaaggtgccggtggcgttccagatgatgtgccacaccaccggtatgtccgtgaagctgatcacgccagaggccagggccaggatcgcgccgagggttgcactccagccgacgccgaggcctttgggctgccagattacgaggacaatggtgaagatgaaaatggcaatcgcgacaagcatgaattaacgctccgatggctcagcagcaggtgcgggcccgttgtggtctgtcgcccattgcatcaagacgctgagcgtcgctgagcaaccatggcctgttggcttgtaaggtggtttccagcacttgagtgacccagacgggcagtgccggattgatgcggtagtagatccattgaccctgacgacgatccagtaaaagcccgcaggcccgcagctgagccaggtgacgggaaatttttggctggctgtcgtccaatgcatggatcagttcgcaaacgcaaagttcgccttcgcgaagaatcaataacgtcagccgtgcccgagtggcatcggccaggcatttgaacagggtgggcggggagaaaagatcggacatggccgaggccttgcaatatatggaaatacgaatatacgtatatccatatatgtaggtcaaatcctgaattcgattgatgtggatcaaagccccgtaaatcagccacaagtgactgaaattaaaatgaaacacgaatgtcctaaagtgcctgcccattgttgaagaaggaagaacccgcgtgacccgtgccactcgcaacctgcgcaagaccctcgattccgtcgcggacaataatgaaaccgcggcgtttgatttgatgcgcgcggtcgaaaaactcagcgatgaagtgctgcgtcaacgcctgctcaacacgatccaccggcttaaccaggatgcctacgagttgcgcgaagcgcgtgatgcggtggagcaggtgtcagtcaagctggcctgagcacgatcgttcaagacaaacttcccgtgacgctggcatgcttgtcgactgtctgtcgatgagccgtttccatgcctactgccgtcccttatcacgccttcgctcgcggcgcgattgccgtcattcctttatccctggcctgtgcgccgtgggggttgctcgccggctccatggccattgatgcgcagttcagcccgctggaagcccaggggttgtccgccatcgtatttgccggtgctgcgcagttggtggccatcggcatggtcaagagcggcgccagcctgatttccattgttttgactactttgttgttgacgtcgcagcacttgctgtacggcatgcacatgcgcccgacgctgtcttctctaaatgcccgctggcgcatgagcctgggctttttgctgacggatgagtttttcgccctggtcaaccactacgaccgcgaaaccttcaaccgctggtacgccctgggcgtgggcctgacgttttatatcgcctggaacctgttcacactggccggcattgtgctcggcaaaagcattcccggtcttgaccagttggggctggagttttccatcgctgccacctttattgccttgatcacgccggtggtgcgcgacgtgcccacggtggtgtgtgtcgcggtgtccttgctgttttcggtgtggctgagttacctgcactgggaatcggcggtggtggtgtcgggtgtgttgggcatgagcgcaggctatgcctgcaagcggttgggggtaggccaacaatgatctacatcatgattgtgaccatgggcctggtggtgtttttcaaccgctacctgtttatcgagccacgtctgccggtgcgtctgaaccgtggcgcgcgggagtttctcggctttgcggtgccgggcatgctcacggcgatttgcgggccgatcatctttctggctgatcacacactgaacctgagccccgccaacccctacttgctggcgggtatcagcgcggtggccttgatgttctggacgcgcagcgtattgatcaccgtattgctgagcatggcgctgttctatctgtttcgctggtggctttgaaacgcaggcgaaaaaaagcccgcgggagagcgggcagaagggagacttcttaaaaatgagcccgccgactataggcgccacggtctggcgtcacagtgaaagaaagttcatgcatgcgccagccgacgcccgagcggtggtagagtcgcgtttttttccaaggaagtaatggcatgcgaaaggtagtcattggcgcgttggtcctggcagcactgactggttgcgcgggctcgaagatgaaagaagcacgcgcaggcacgccgtacaaaaccctcgcctcggacaaggcgccgttggtggttgcgcagtgcatccagttcggttggcaggatgaagcggtgtttggcgtggatgccggtggcttcaaggaaccgctcgaaggcagcggttttacggtgtacaccacgggcggtgactacttcgccgacgtgcgcagcgcgggcgctggctcaaccgtcaagtactacgcggccgaggacacgatgccggccaagcgtcgccaggcggcactggcgacctgcctgtaatcctttgcctgggtaaaattcggaaaagcccggcgggacagccgccggacattggcttatcattctttcgctcgctcgaggtgatggctctttaccagtacacggacgtcgaggccggatcgtcgggcgagcaaccctctcaactccccacatcttccgtcggcgccaggcgccagccttcagcgtgccagtccagcgtgtgggtaggcttgatggcgtgcaggaatgcttcgtcatgggaaaccacaacaaccgcgccggtaaacccgcgcaatgcctgctcaaatgccagcaccgactccaggtccagatggttggtcggctcatcaagcaacaacatttgcgccggcacttggcgccacagcgcaacggccatcgccgccttcaagcgttcaccaccactcaattggcctgcgggccgggttacgcgcagtgcatccagttgcagcaaggccaggcgcgtacgcagttcggcttcggccagcggtgtgtccagcaggttgagctgttcgacgagggagcgccggccatccagtaaggccaggcgttgatcgagataagcactcggcacctgcaccgagcactctgcgctgatggcatgccattgcccggcgagcaatttgagcagtgtggatttgccgcaaccgttcgggccgcgcacggcaatacgcactggccccatcacattcagcgtgacatagctcgaaggggccaaaggatccagccagggcagttgagctttttccaggtttatgacctgccgccccctgggcactgccgaagcgggcagggccagcagggtcggcgtttcatccatcacgcgttcataggcctggcgcacctgggcgtcgaggtgttttttttgcgcatggtgggcgctgcgcaccgtgctgacgatttgcgtggcagcgcctttccagcgcgccttggtaaaccggtcgacgttggcagtttcagcgtgtttgcgcgagtgggcagcactgcgttgcaggctgtcgtggtcgctctgcaggcgccggcgttcgcggctgcgctccaggcgcgcgcgctccaacgctgcgacggcagcgtgttgctcggagtcacgctgatggcgataggcggtgtagttgccgccatgcacacgggcgccgaggggcgacagttcaatgatgcgctccatcgtgttcagcaattgccggtcatggctgaccacgaccagcccgccgcgccacctcttcagttgccccagcagccaatcgcgcccggcattgtcgaggtggttggtgggttcatccagaaccaacagctgcggcgttgccagcaacgcaccgatcactgcgacccgcgccagttggccaccgctgagttgattcgccggggtggcggccgtgagttcttgcaagcctgccgcatccagagcggtgcgcaggcgcttggccaaatcccagcgatcgccgatccgctcaaaatcatcgtcctccaggcgatcaagggcggccaacacggcggcagtgccggtgacgtctgccacggtgtctcccggttgcaaggtcaaatcctgagggacataagccacgctcgccgaacacttcagcgtgccggaggagggcgccaggcgcccggcaatcaatcgggccaggacgcttttgccgcacccgttgcggccgacaatcccggtgggagcgtggtcaatcgaaaaagtcaggtcttcaagcaaagtttcgccatcggcgaactggaaagccaggtgttgcagggaaacgagtacgggcagccggttgacgtcagtcatcagcacctccaaaaaaatgtcgaacaggccaacaagcgcgccaggcggctcgttgcaggtacattttggaaggcttaggtgttcacgtcggcggtcgtcccgtgagtcagaagggaggtaaaggctaactcgccttggcgcgcttgggcaagtcggcggccagttgctccagaaacatcgccaaggcgacttcttcagctttcagacctttgcgaacgcgaggcttgggcagtttggacaactcgccaaggctgaaatgctccagcactgcggggtggatatagcacttgcggcacaccgccggggtgttgcccagctgcttggccacatccttgaccatcgccaccacatggcgtttggcgtccgattcgggctgccactccagttcgcgcaacacggccaatgccatggcggtgcccgcccaggtacggtaatccttggcggtgaagtcggcgccggtgaggctgtgcaggtaagcgttgacgtcggaagaactgacggtgtgccgctcgccgtcttcgtccaggtactggaacaggttctgccccggcagttccaggcagtgtttgaccaccgtcgccaggcgccgatccttgacggtgatttgatgctccacgccactcttgccgcgaaactggaacttgatcgcgctgcctttgacgtcgacatgccgcgtgcgcaacgtggtcaacccataggatttgttatcgcgggcgtactgcgtattgccgacgcggatcagtgtggcgtcgagcagcatcaccaccgtggccagcaccttgtcacgggtgaaaccgggctcggcaatctgcgcttccagctgtttgcgcagcgcgggtaaagcgttaccgaacgcttgcaggcgtgcgtacttatcggtgtcgcgcacttcgcgccaacgtgcgtggtagcggtactgtttgcggccccgggcatcaaggccggtggcttgcaaatgaccgtgcgcgtcagcgcagatccacacatcgctataagccggcggcaccgcgagggcgttcagccgctggacggtgtcggcatcggtgatgcgcttgccctcggggtcgaagtactggaacttgccgcgcagccgtttgcggctgatgccgggctgggtgtcgtcaacgtaatgcaggtcacggggcagcgcagagtcaggcatttggcgaattccttggcaacaaatcaggccggtatgtctgattgaccgcagccatttgcggtcgtgccaaaaggtttctacgccagcacggccaccgccttgatctgcgcccacagcctctggccggggtgcagttgcaacaggtcacgggagaaccgcgtgatgcgtgccagcaacggcgtgccgccggcgtccaggcgcaccagcacatgggcgttgttgtcggccgaaatctcctgcacaactgtcaccggcaagcggttgaggatgctgctgtgttcttcaccctgcaggctgaggctcacatcccgcgcttgaaccttcacccgcagctgtttacccaacgccagcggcgcgtgcgccacgcggatgtgcaacgggctgcccggcagctgcagggtcatcagttgatagtgctcatcgtaggcactcacgctgccattgatcaccacaccggcgtcgtcgcccaaggccatgggcaggtcgagccgcgccagggtttcaccgatggggccgctggccaaggccttgccgtcgctgagcagcacgatgtgatcggccagccgcgcgacttcgtcctgggcatggctgacatagagcactggaatgtccagctcgtcgtgcaggcgttccaggtacggcaggatctcgcctttgcgcttgctgtccagcgccgccaacggttcgtccatcagcaacagtttcgggctggtcagcagcgcgcgggcgatgccgatgcgctggcgctcgccgccggacaagtgctgcggatggcgttcgagcaggtggccgatgcccagcagctcggtggcctgggccatgtccacccggcgttgctggcgcgagatgcgtttgaggccgaactccagattggcacgtaccgacagatggggaaacaggcttgcttcctggaacacatagcccagcgcgcgtttatgcggcggcacaaacagcccattgcggctgtcctgccagacgtcatcgttgatctggataaacccgtcttcagcctgctccagccctgcaatgcagcgcaggcaggtggttttgccggagccggaatgcccataaagcgccgtcacacctcggccgggcagatgcaggtctacgtccagcgcaaagccggaatagttcagctgcaggcgtacatcaatcatcgcaatcagctccagcccattttggttttacggctggagtagagcgccagcaatacaaggaacgcgaacaccaccatggaaccggccagccagtgggcctgtgcatattccatggcttcgacgtggtcgtagatctgcaccgagaccacgcgggttttgtccgggatgttgccgccgatcatcagcaccacgccgaactcaccgacggtgtgggcgaagccaaggattgacgccgtgataaaacccgggcgggccaggggcaggattacggtaaagaaggtgtcccacggattggcgcgcagggtggcggcgacttccagcgggcgggtgccaatcgcagagaaggcgttttgcaacggctgcaccacaaacggcatggaatagatcaccgagccaatcaccagcccggcgaaactgaaggtcagggtgcccaggcccagccattgggtgaactggccgaagtagccattggggcccatggtcaacaacaggtagaaaccgatcaccgtgggcggtagcaccaacggcaatgcgacgattgcgccaatggggccgcgccaccacgagcgggtgcgcgacagccacagggcaatcggagtgccgatgaccagcaggatcacggtggtcagtgacgccagtttgatggtcagccagatagcggagaaatcggcactcgatagcggcatttacagctcgtaaccgtaggatttgatgacggcagcggctttaggccctttgaggtattcaaccaacgccttggcagcagcgctgtctttgcccttgttgaggattaccgcgtcctgcttgatcgggtcgtgcatggacgcgggaacgatccacgccgaaccgctggtgactttgccgtctttgtagatctgcgacaaggccacaaagcccagttcggcgttgccggtggagacgaactgataggcctgggtgatgttctggccttcaaccagtttgtccttgaccttctcggtcaaaccttctttggccagcacttgcgtggcggcgaggccgtacggcgcggctttcgggttggcgatggagaggtgcttgaagtcgtttttcttcagcacgtcgcctttggcatccacgtagccttctttggccgaccacagggcgagggtgcccacggcgtaggtgaagcgcgagcctttgacgctgtcgccttcggcttcaagtttttgcggggtggtgtcgtcggcgctcaggaacacttcgaacggtgcgccgtttttgatctgggtgtagaactggccagtggcgccgtaagcggcgaccagcttgtggccggtgtctttttcgaagtcggcggcaatcgcctggatcggcgcggtgaagttggcggctacggcgacctggacttcatcggcgtgggccgaaccaaaggcgagggcggcgaccagaacggccaggcgtgaggcgtgaatcttcatgaagcagctccttttttaacactgaggcagggggggttaggcttgttatggcttgttatagagagaaggctcaaccgctatgtatgggaatatatagcggttggccatcgccggtacagcctaaagttgccccaggtgtcagaactgcttgagcttggccaacgcctgctcggccagttggcgtgtcaggtcatagcttgaaatatctttgcccaaacgtagcgcctgacccgaccacaagttactgaaacccgcttcatccttggccttgagcggcatcaacgcaccgcccgacgtaggaaatgccggcgcggcagagttaatcgcgcccagctcacgcatcacccggttgacgatgccgcgcgccgggcggccggtgaacaggttggtcaacgctgtttcgctggcctgggcagtgcgcagcgcgtggtggtgagaggcagtgacgttggcttccggcgtaaacaggtacgccgtaccgatctgcacggccgacgcgccgagggcgaaggctgcgacgatgccccgcgcatcaccgataccgccggcggcaattaccggcacgctgacggcgtcgacgatttgcggtaccagggccatcaggccgatctgggtgttgaggtcgtcagtcaggaacaagcctcggtgcccgcctgcttcaatacccatggcgataattgcatcgcagccatgttgttccagccagatggcttcttccaccgtggtggccgaggacagcactttggcaccggtggccttgacccgttcgagcagggatttttccggcaggccaaagtgaaaactcaccacctcgggacggaattcttcaatcaccttgcatgcatcatcgttaaacggcgcgcggttggacacgggcgtgggcgcgtcaaagtcggcgcccagttcgcggtagtaaggctcgagtaaatccttccagcgacgatcacgcgcctcatcagccgcaggtggttgatggcagaagaagttgacgttgagcggctttgcgccagcctcgcgcagagtggtcaaggcttcgcgcaattgttcaagggtcagcgcggccgccggcagtgagccgagtgcgccggccttgctggcggcgatgaccatggcggtggttgtgcccaccgccatgggtgcctggatgatgggcaggtcaatgcccagcaggtcgagaattcgggtgtctggccaggtgctcatgggatccgtctccagcgtaagtaaggcgtttcgctgttttaacaggggccttggcacccggccagtctgttttattcactagacgaagggagcgtttcgtgtcggggcgtcagccgattgccgatccgagcaccgcatgaatccgctcggcaatgtgggtggcgtgggtttccagggcgaagtggccggtgtccagcagttcgaccacggcattcgcattgtcgcccttgtaggcgtgggcgcccggtggaatgaagaagggatcgttctgaccccagatcaccagcgttggcacttgtgtggctttgaaaaacgcctggaatgccgggtagagcgtgaggttgttgcggtaatcgaggaacaggtccagctggatctcgtcattgccagggcgttgcatcagcagtacatcgagcatgtacgactcgggtgcgaccaactctggctggtttacaccgtgcaggtattgatagcgcgttccttcaaggctgatcactgcgttgcggatgacctcgcgattggcctggctcggttcggcccaataagcccggatcggcgcccacgcatcgccaagcccctccagataagcattgccgttttgcgagaccagcgcgctgacccgctctggatgagccacggccagacgcaagccgaccggcgcgccgtaatcgaagacgtacaaggcatagcgtgtcagcttcaacgcatcgacgaagtggccgacggtgatggccaggttgtcgaaactgtagtggtaaccgcgttctgcaggcacttcggtgaagccaaaacccggcaagtccggggcgatgacgcgaaagcgcgtagcgagcagcgggatcaggtcgcggtacatgtgcgaggagctggggaagccgtgcagcagcaatatgacaggggcggcagggtcgccggcctcgcgataaaacaggtttacgccatcgacatcgacgtggtggtagcgaacaaccggggtttggagagacatgatttgcgcacctttagtaacttgataagtgagtattacgggttactggctttaaaagctgcgctgaattatgtaacctgtcaaatcaatttagcaggttatcaaaagttatcacgtaactggtcagatccagaaatagcggttaccattcgctagcgctcaagaggacccgccatgaccactacactctccacaaccacgccgctggacccgtatgtcctggccgatgatccggtactggacatgctcaacaccctggcaaatatcgacggtgtgccgtgggacttctggaaggttgacgcagatgtcgagcgctggctggtgcgcctggagtgggtgaaggagggcgacacgcctccattcggggagggcgacttgctcagcgctgcgagaacgttacgtgaggtggtccgtgagctggtggcagcacgcaaggccggccagccgggtaaccccgcagccctgaacagttttttacgcaaggccgtcagccatccgcaattggtatggcccgaatccggcgcgcctctgcttgagcgccagcgcaagcagcagacggccgaacaatttttgtcgccgattgccgaggcagccgctaacttattggtggccggggatttcgatttgattcgccgctgcgaacacccggaatgcatcctgtggttttatgaccggaccaaggcccacaagcgccgctggtgcagcatggcgctgtgtggcaaccggcataaggtcgccgaatttcgaaaacgcaagctgaagctttaaaaggagaggcgctttgccaaccatcaaggaacagaaagtggcggcgatccgggtgtccgggttgaaagtgcgcacgcgcaatgccgacgaaatgcaggtgtcgagcgcgaaaatcggcccgatgtggcagcgtttttttggcgaaggggtttacgagaagatccccggcaagcagcccgagtcgccagtctacggggtttacagcggctacgaatccgatgcgcacggtttgttcgacgtaaccgccggcgtgtcgacccacgccccggcgcaaggttttgaaagcctggtgatcgagccgggacgttacctggtgtttgaagcccaagggccgatgccggacgccatcatccaggcctggcagcgggtctgggcgtatttcgaacagccggatgttgaggcacgtgcctttgttaccgactttgagctgtaccaggcggacaaccaggcacaggtttatatcggcatccgttagggcgttgtttcccgctccagcagttgccgcttgcgctcaacgccccagcggtagcccgacagcccaccgtcgctgcgcaccacgcggtggcagggaatcgcaaccgccaggctgttggcgccacaggcctgggccaccgctcgaaaggacgtgggcgcgccgatgcgttgggcaatctgcgcgtaactggcggtgctgcccaccgggatctcacgcagcgcttgccacacccgttcctgaaacgccgtaccgcgcaggtccagcggcaggtccaggcctaaggctggcgcttcgataaaacccacgacctgggcgatcaactgttcgaaatcccgatccgcccccaccagttcggctttgggaaattggtcctgcaggtcgcgcaacaaggcgtccgggttatccccgagcagaatcgcacacacacctttttggctctgcgccaccagaatcgcgcccaatgagcattggcccaccgcaaagcgaatctcgttattgacgccgccggccttgtaatcgcggggcttcatgccgagcagttggccggcggactcgtagaagcggctgttggagttgaagcccgcgtcatacagcgcatctgtcaccgaatgcgcgcctttgaggttgtcgcgcaccttgcgtgaacgcagggcgctggcgtaacccttgggcgtcaggccggtcacggatttgaatatgcgatgaaaatggaacgggctcagcccggctgtacgagcgagttcttcgagattgggcggtgtttcggcgtgttctatttgccgacaagccttggccacgatttgcgcatggtgtgctgccaattgggtctgatcgccagcagcgcgtttgctcgggcggtaacccgccgcttcggcctgtgcggggctgtcgaaaaactcgatgttttccgggcgtggcaagcgcgaggcgctgctggggcggcaataaaccccagtggttttcacgccataaacaaatagcgcatccgctttcacgtcacgggcgacaatggcggcccagcgtggatctgtttcgttgcacatggcctgcactctgttgggttcaccggcagattatctgcgctgagggtttgcggcactctgaagcttgcggtcaaattaaccggcagtgcgaaacgtcaggttgatacgttgcggccccatgaccgagtgcacgccatccttgatcggcataaccccgtgaaagcgcaagcgatcgacaccgccccagaccacgacgtcgccgtgaaacagtgaaaccttttcggttttgtcactgcgcgcatggccgccaaacagaaaaatcgcgggcaagcctaacgagagcgagaccaccggagcactgtagatccgttcgtttttatcttgatgcagagacatcttcgcgccgggcacatagcgattgatgagacaggcgtcgggagaaaagcccgggaagccggcttccattgccgccaatactgcgaactggtgcaaggtatcgggcattgccggccaaggctgccggcttcgtggatcaacagaggtgtaacggtaacccgtgctgtcagtggtccagcccagcgcaccgcaactgctcagggccgccgacatcgtgaagccgccgggcgtgaccatctgccgaaagggagattgggccagcacccgccgtagctcaggcagaatgcgctcgacccaggagagggcgtagccgcgaagtacgcaggactcttcgccaatgtgttcgcgcgctgcaggttgctgcaaagcagcctcggcgaacagatcggcagtcgggccgtgcatggcttacagggccttgctcacattgatgtctgtgatttcgtcgctggcatcgtgaattttcgcaagggcttgcttggcttcttccacgttgttgctttgcagctgggcaaactcaaagcggcgttcgccgttgagtttgtacttgatgacgtatttggtggtagtggtcacagctatttttcctgtcgtgtgtgcagatcagctcagcttggagctggtgcgacgaacgatgcggatcttgtgggacagcgccggcttgcgggtaacgctgatggcgcggcgcgtgacgacgtcgagggtaatgttccagaaaccggtactgggtgcggtaatcttggccgggaactgatcgaaagcgccgccgtggtaggtgtggcgcccaccgttcttgaagctgcgaaagttggcgtcgctcatcaggcgaatgttgcaggtctgcgagcattcaatgacaacgatgtcgccctcgttgaggtgctcgcgctggtggatgaatttcatggggtgtctccagaagggctttttctgaaaaatcagaacaatacgtaggataagatggagtttatcagccccagcgcgtttattatcgcgccgtcgtcgatgacgtcgacaatttaaaacagttatttactgagttttcagagataaatcctacattggcgggagaaaattaccctctacgctgtcgtaggatctttatcggaggtttaagtatgaagtggagtgtgttggttctggccctggcgataggtggatgtgcttcggttgcagatatcaagcagaccccgcccaccttggtggtcatctcagggaaaaaaccacaggaatacgctgcgtgtgtggtgcgcaagctcgctgatacccgccgcccgccgcagattgaaccgcacaaggatggtgtacaggtaatcgtgccacagaaattctcggccgacccttcagcgatttttgaaattgaggaccgttccagcggcagtagcatcaagctttatgaaagcatgtccaatgtgccgatccgcccgggcgacatcaagaaagccggagaggattgcatttccggttgagctttcagggctcatctcacgcactcgaatccgataaaaaaagcctggccctgcgtttgcagcgccaggctttttttgcccgtgaaacattcgtgtaaaatgcaaaaatgctgcgcaaaccgcgggtttgcgcagcatttgtctttatctggaatgcgctcatgaaacgtgaagttgttaaagcccgctatgccgaagggcagatctcggccacccatgtcatccagaacccggctgacctgggcgagtggatcgtatttttcaagaagagtggagggcgcagttactttctggtggatgagcaggatgaggtcgagtctttcccgcgcctggacgacttgattgaaatcctgcgcggactcggtatcaagttcgccgaaatccacctctagcctggcggcctatttgcaaaccaccacgacgctgcggcttttgtaattgcccacgtctttgcccagggttttgtcgtcttccttcagcgatggtgtgccttcggtgccgacgatgcgataaccggtgcctgcgcacgaggcatcagctttttcgtagcaactggcccaggaattggcttcgcccgaacagtcaatggtcaggccttgctcgccatttttcaggtaggtgtcggacgtggtggtgcagccggtcatcaatatcagtgccgcggtcagtgccagaatcttgttcatggtggggtcgtcgtcgagggtgttggagggcgctgacactgtcgtggggcggttgggcaagattatagccatctgccagctgcgcagtctcggggaaaaatctctccggctgcgcagcgttatccccttgagctggtttacggcacgcccatcaccagtacaccgctaccgctgacagaaccggcggcaggcagggacccgttacgccgagtcagggaaaacgtcacgtcgtccgcgccggtgctgttggtgatctgcgttctgaacgagccgttgaccggcaccgtagaccctgctcgcaccatggctgtaccgacgtccccgttggtcattctcagcaggcgcgagtcaaacgaggagggtgtgcctttgtaggtaatggtgatgggtacggtaattccgccatctgggcacgagtaagtgagcctgcggttgcttcggatggggctggtcagcgggtcggtgcctatctcgcgttggtgcacggtgccgaagtccaccacgatcgggttgttgttattgatcgtgcaggtcgacggtgagatggagaagttattggcagcggtatacgtaagcgcaagcgcggcactcccggaattgtagttgttcgtttggtcgaggtttagtcgcccgagaacatcccctatcctgatgtcgatcgggtttgtggggtcgttgcgtaccaggatatagggcgttacgtcgaccgggacgccgatattgttattcggcatggtcgtcattcgaatgccattttgaacaggggtattgtagtagcttccgtttattcgaagccccgtgccctcgcgagtgaattttggacccggcacccaggctggcccgactcttgccgatgttgcccagtagtccgtataccaaggctggctaccaccaaagaaggtgaatcggcattcgatcctcaccccctcgaggatgatacgggtcctgtcggcgttcaattgaacgttgacaggcacttgcaggtttatcgttccgccaatgcctacggttatccatggtccgttattcacacggcagtcggttgccttcgcggtcgtggcaatggccgtcaggataagaagtacacaggttgcatatagtcgtttcattttgatctcacattacgttctacccggacaccgcccgacaaataatcagaccgcgcttcaaggctgcccaagaaatattgaggtattgcctgagtgcgctttttcattacggataatccagcgtaaacgtcgaggtcaccgtgtacctgccgtgcccgatagtctggtccctgatcgcatccggttcgccctgcacgtaggctttgagctcaatcacgttgctgccagtactcaacacctgcttgtcgctgacggtattgacgggtaacggtttgttgctcggggtttctatgcccaggccaatgccggtggcgccactgccaccatccagcgcgaacaagccaggcaattttgtgttttccgtgccgccgagcatgatggtgaccgagtctccaatcgtggtgtcacagttctccagatgcacctcgaaccccttaccctgtgtgcgcgtattgatgtagaggtgcttactggtcacgtcccagagttccagcgtgatcgcatcgtcaccggggcgaatcgtgcacgcctcttcaaccaggttgcccttgaaactcaggttgtctgctgcattgcccttgggtgacaacccgacggccagcagtaagaccagccaggcacatgcccatcttttgtaatccatttcatgtcgcatagacgtggctcctactggtattcagccaacagcgtggccaccgctgcaaacctggcgggggccagcgttgcaccggcttgtttgacgggcgccacttccagcgtcggaggtgacgacaaaacgatgtccattggcgtattgagcgggaacggcacgttattctgaaaaatccgaatacccagcgccgccacgttggtctgcaccgctgcgccatcaaacgccgtgggcgtcccgttaacgctcagcttcagctcccaggggagggtggccgcgccacagttgatggtgtaggggaccgctttacggtacttcacaccgtcgacgcgcttgacacccacatcaccaaaatcgacctcaatcacgttgcccgcatcaatggtgcaaggcggtggttcgttcagcgttccactgaacgtcaggttggccgatgcgctaccgcacaggccgatggagcacaaggcgagcaatgctcgccgctgccagcatctcattgatcattcctcttcattgataatcgaccaccagcgtggcggtcgcatcaaatgcccctcccgtcagcgtgctgcccgcccgtttgacaggtactgcctgcacgaccgggaagttgggataggtaaaattcacggtccggttcaaaggccagtcagcaccattgacgaacagctttacgcccaagtcagccttgcgcgtcatcagcaccgtactgtcaaacgcggcgcccgtgcccctgagttccagcgtcagtgcgttgctgaagggggagtcgcaggtgacggtataaggcacaccgcgccggtaattgaccccgtcaacacgtgaggtcagcaagtcattgccgaaaggtacgtccagcgtactgccgctgttgatgacacaaggtggaggcgcaatgatgaccgcgcgaatggtcaggctggtctcagccagtacaccttggctggcggcccacaacaggccgccgcctataagaacggcccaggggccggttgacttcgccatcgttctgcccttactcataattgagcctgaaatccaccacggcccgaaatgccccgctggtcaattgagcggaggtccgtgtgggctggaccttccaggtctgggtattgctgcccagtggaaggaacagcggttcccctctcgagcccagctgtacgtcccgccccaaggcgtcggtgaggtgcaggcccatgcccgtaatgccttgcaccttgagcagccgtgtatcgtcggcatcggcaggtgcgacaaacgcgaccgacaccaccggttgaaacgcgctccacaccagattcccggttcgctcactgcggatgccacccgccttgcgttggcaatcggcaaaacgcagttgaaaggcaatcggggtggcctgatcaccagggcgttgcaattggctggtcgaaacggcaccgagatcgatggtttgatgcaacgaggtcatttccaggctgcagggcgtttcatgcatggatccgctgatgttcagcattccgctcatgccctctacatcatcttccagagcttgcgcagcccccatggtggcccacagcagcacgcccaggatcttcacgttgtgtgacttcatggctttctcccacggcaagcgttactgattgggcgttgatgcttgcgcgttgaccttgcacgtgttgcctgcgcaggtgaaagccatcagtgggcggccgccgtagtcgttcacgtaggccaaatgcggggttgtaccgagcgctttggcggttggccccaaggtcagcgagcctttcggagggatcatcagcggctcaaagcctgctacggttttgctgtccttggtggtgcgcgcatccaccagggttacgtagtagggcgtcgggttgttcacttggtagcgttcgccttcaagggtcagcgtcagcttttcttgccaagggttggacaggtcttgttggcttggcgcaatagcctgcggccgatagaacaatttgattcgggtctgcagtgcaatttgcagggtattgggcttgtcactgcgcggtggaatttccctcaggttgaagtaatagaccgtctctcgatcctgcggtaacgacttggcggccggtaacgcttgcactttcagctggctttgtttgccaggttccaggcgttgtaccgggggcagcacgatcaagggcgaggtgatttttttgccagcttcgtcctcaatccagccctgagccaaatagggcaattgggtgttgttgttggtgatattcacgctggtagcctctttgccaccatcaaaaatcactcgcgtgcggtccaggccgacggcggcgttggcgttctggctcaaccccagaaccagcaaggtgagggccgtgagggcgaaacgtgtgttgtgcatcatgaggatgttttctccgtatcggtacgcttgccggtcaatgtggcgggctcggtcaagggttgttcagtggctaccagttggcagcccaattgcagggcgtcagtcaaaccatcagccggcaacaggtcgggcagggtcaggatgcagcgttcggtgccgccccaactgacgaccatttgttcgccggcctgaatgccgctcaggtagacattgccgccatcgttcacaatgccggtgtcctgctgtttcacgtttttcaccgttgcgccgaagggcggtgaactgccatcaggcaggcgcagaacggccatggctttctcgccggcaatcaccgccagcgaccgataaccgattgcgccttcggtgagcgtcagttgcgtaacggatgaagtggcttcgatattgctcggcaagctctccaggtcgacactggcggctgtgcgcaggtagctgccgacgtcggcaatcactgctttgccgaacgcattgctgcgggtcggtgcgccgtaaccgcgcaccggcacatccggcacaccgccggtgtcgaccatcaggcgggtgccgccggtgctgttggtacgatgcagggccgcgccatgaggcgttagcgtgccaccgccacgagccgatacgctgagcgttgaataaccgccttcttgtcggctcgcggcaaggtcgatgtcagcctggtcgccgatatggttcaggtaaccactggcggccttgtcgctggcgctgacctggtaactgttgcgctcatcgaggcggtcgctgtaacgcgtgccaaagccgttcttgcctgaggtgcggttggcgtccatcgacagtgtgccggtgggcccgaacggcaggctgaccgtcagcgagaggccgttgtcctgatagttgtattcctgagtgcggtgcaggttcagggacaggttcaggtttttgacggtgcccatattgaagtagcgtgacgccgacaggttccagcgctgagtggcggggcgcccccaataggtttgtttgttgtagctggcgtacaccgtggctcccagatcacggaactgcttgtttacggtcgcggtatagagcgccttgctgtcgccgatcggtcgccagtcccttggcagctcaccgttggggtcgcgcccggcgagttcgccgttcatgccgtaatgacgagcatcgaggtattcactcatgctcaagtagttcttctcggaaaaccggtagccggcgaacgtaacctggctgtcgtactcctcgaagtgcttggaatactgcaggcggtacgatttgcccgagagtgtctcgccccacaactcggcacgcgattgagtgacatccagcgacagtgcaccgaaggccagtaggtctcggccaacacccgccgacaaggcgccgtagttgttatccgtgatgccaccgccatacagcgaccagccgttgctgaccccccatgaaaattcaccggttccgaaaaagtcgccgtcggcgccgtattgaagattggacggtcgtcctgccgacaccttgtagcgaacgtgcccggggcgcgtcaggtagggcacgccagcggtatcgaactggaaggtgtgcaccgagccatcctgttcttccacccgcacatccagccggccggtgaccgcatcattcaggtcttgaatgcgaaaagggcctgctgcaaccagcgtttcatagagcacgcgcccttgttggctgacgatgaccttggcgttggttttggccacgccaaccacttccggggcgtagccacgcaagttgggcggtaactggctttcgtccgaattgatcgcggcgccggtaaaacggaagctgtcaaacaggtccgaatacagatagttttcgcccacgatcagccgtgcctgcagctgcggaagtgcgcggtaggcatagtaacggctccactccaatgtctgccggcgcccggacgaatccgagcggtcctggtcgacacggccctgccaatctgccctcaaacgccaggcaccggcattggccccgacggttccgttaccactgatgttgttgcgggccctgtcattgctctgatggccggtttgagctgtcatgttgtagtcaatcagcagccccggcaccccttcatcccagcgtgagggcgggtcccaattgatggcactgtattcaaggtaggcttgaggcaagttgatattgagcgtggaagtggccaagtcgccactgacttccatccctggcaaactttgagtctctaggcattcgccctctttccaccatgccaacttggcggcactggacttctttaaacccaactgttctacaaggtctggggataaacaggcctggctgcctttggggtcatcgtcgggtgggtaaaaggccaccgagtgttccgaaatgggctgattattaatctgtataaccattgaatacgtgcccggcagaataaagccgctgcgtgcaaactgggacaagtcaatattagagcgatcattgagatcaagaacgtcggtattaaattcgatatccccggcagccagcgcggtgcccgccacagatattaagctgcccaccaataaacgggggcgcaatgtatttttgatcttcgacgcattcagcatgaaagcaacccatcaatgttcaaaagtattccaacttgaaccgcaccgcagcactgtgagcgccaggcaacatctgcagcccgttgccgaccaggcgaagtgtgtagttcagcgtcatgtcaccttcattcaacggatgcggagtcatccgctcgcccgggacactctcctcgcccctggagtcccaaatatgcaacgccaccccttgggacagacctgaagccgcaaaggaacggccgtccctgtcgcgagctccgtcaaacgtcactctcaggtgctcccagtcgggcaaggtggcgccggggcgatccgggtcagggcgggtcaatgagcaattgaccaaccgcagctggaaggggtgaggggcgcccaacgcgttgcgcaaaagccggccgatgggctcggcaggcatctcgatcgtctggtcagcactggacagttccagcccgcaggcggagtcaatgatttctccgcccagtgtgacaacgccatcgccttgaccctgcgcaagcacgtaagggctgatgagcatcgtcagtgaggtgctgatagcgaggcttatgaatgtattcaccgttgtctcccgccaggttccccccgccacgcaaggtggcgggggaaaaacttactgataagccagggtgaagttggtgaccgctgtgaaatcaccaggaacgatggtgccggtggcggcaccctgcacgtaggcaccgaactccagtgtgttgtcaccggcgacaatggcttgcggggcggtcggcacaccgagttcaacaggggtaccgccgtgggtcatcatgacgccgatgttgcccgcgccaccgaccgtaccaattgcaccaggcacgacggtagacggtgcagctgtgaaggtagtggttactgtgttgtcggtaaggccggtcaagtcgcagccttcaagctcaatgcgtacagaccgggcattggattttccgccgttttgcaactggtgctttgcaatggcccccagagggactgactgatccacggattcaggtttgatagagcaggcacccgagtgaaccgaccccaaaaacgtaatcgttccgtctgctgcttgagcggtggcgattgaacccatgagcagagcgatagccagcagtgcagttttcatttcagttttcatttgcaaagactcatctagtagtaaaaagcatgaataaatcccatcacaattgcgtggaggatttttcaggcgtgcaagaatggccagcgccattgcgaacctgttgttaaggctttgaactttcaatatctggaatgtaaataatcgggtttttccaactatttgcattgcaaatcttgatctgttcgaagccagacaattgtccggtctgtgcgcgaaaaagtaagtcgccgaaatcgtttagttgcgtagctttggtgtgtcgggatgtgtaagagacttatggccatttgccaaaacttgaaatatcactgtaggaagttaactacactgcgcttaatgagaatgttttagagttcgcgttatctgtaagactaggattacatgcgttggaatacaagggcctgatagggcgtcgactaactagcgcgcggcgttggttaataagtggcgaggttgcgatatatcagcgcgcacaaaaaagccccggtcagcggggcttttttggggagcattatgcggcttacttgcccttgggtcgtttgctcgacgcgtggcccgcttcatccacaaacacttcagccactgcaatggcttcgcgttcggtcgcgaatgcgccggcaacgctgtcgccgtggaagttgatcaagtgccagccgtccgctcgctgcgtgatcaggtagccgtttacgccttttggttccgacatctatcaatctcgtggtgtggttcaagcgggccatgatagcgccaaatagcccgcaggcgggcaagttgttacaggtcagtgcccaacaggaaaaaccgtgctaaaacggtgtgagcccttttaaacagggtggggcagggtgtgggttgaggggccgctggtaaagctgtgtgcaggatcagcggaacttacgccgacattttttctctatgttgacatcgcaacgccagcaggacccattgtaaggtgactgcggcctgattagactgcgccgaattccgtacgcacagccctttgtaaggactcatatgatcaagaaatgcttgttcccagcagccggttacggcactcgcttcttgccagcgaccaaagccatgcccaaagagatgctgccggtggtgaacaagccactgattcagtacggcgtcgaagaggcactggatgccggcctgaacgaaatctccatcgtgaccggccgcggtaagcgcgcgctggaagatcacttcgatatcagctacgagctggaaaaccagatcaagggcaccgacaaggaaaagtacctggtcggtatccgtaaattgcttgacgagtgctcgttctcctacacccgccagactcaaatgaaaggcctgggtcacgcgatcctgaccggtcgcccgctgattggtgacgaaccgtttgccgtggtgctggcggatgacctgtgcgtcaacctggaaggcgacggcgtactgacccagatggtcaagctgtaccagaagtaccgctgcaccatcgtcgcggtcatggaagtgaacccgactgaaaccaacaagtacggcgtgattgccggcgacgacatcggcgacggcctgatccgcgtacgcgacatggttgaaaaaccggcaccggaagacgcgccttcgaacctggcgatcatcggccgttacatcctgaccccggacatcttcaaactgatcgaagaaaccgagccaggcaagggcggcgaaatccagattactgacgccctgttgaagcaagccaaagacggctgcgtgattgcctacaagttcaagggtcagcgtttcgactgcggtggcgctgaaggctacatcgaggcgaccaacttctgctacgagcacttctacaaaaccggcaaggcctactgatccaaagtagccccgctgtgaaaaagccaccttcgggtggctttttcgtttttcagccccatttaagtcggtatgctggttgcctgccgaggagagtgaaatggcctacgattttgatctgtatgtaattggcgccggttccggcggtgttcgcgcagcgcgctttgccgccggctttggcgccaaagtcgctgtcgcggaaagccgctacttgggcggcacttgtgtaaacgttggctgtgtgccaaaaaaactgctggtctacggcgcgcatttcgccgaagacttcgagcaggccagcggttttggctggtcattgggtgaggcgaactttgattgggcgacgctgatcgccaacaaggatcgcgaaatcaaccgccttaatggcatctaccgcaacttgctggtcaacagcggcgtgaccctgcatgaagggcatgcgcggctggtcgatccgcaccaggtggaaatcaacggtgagcgctttagcgccaaacacattctgattgccacgggcggctggccgcagatcccggaaatcccggggcgcgagcacgcgatcggctccaatgaggcgttcttccttaaagaattgccaaagcgtgtgctggtggtgggtggtggttacatcgcggttgagttcgccggtattttccacggcctgggcgcacagacctcgctgctgtatcgcggcgacttgttcttgcgcggttttgacggatcggtgcgcacccatctgaaagaagagctgaccaagcgtggtctggacctgcaattcaacgccgacattgagcgcatcgacaaacaagccgatggcagcctcaaggccaccttgaaagacggccgcgtgctggaagccgattgcgtgttctacgccaccggccgccgcccgatgctggataacctggggctggaaaatactgcagtcaaactggacgagcgtggcttcgtcgaagtggatggccaataccagacggccgaagcgtcgatcctggccattggcgacgtaattggtcgcgtacagttgacgccggttgcgctcgccgaaggtatggcggtggcgcgtcgcctgttcaaaccggagcaataccgcccggtggattacgcgatgattccgacagccgtgttcagcctgccgaatatcggaacagtaggtctcacggaagaagaggcgaagaagaacggccacacagtgcagatttttgaaagccgcttccggccaatgaaactgaccttgaccgagtgccaggaaaaaaccttgatgaagctggtggtcgatgccgacaccgacaaagtcctgggctgccacatggtcggcccggatgccggcgagattgtgcaaggcttggccatcgcgctcaaggcgggcgcaaccaagcaacatttcgacgaaaccatcggcgtgcaccctacggcggcggaagaattcgtcaccatgcgcacgccaaaggccgactgatcaggttgcaggcgttgcctctggcgccgctgcaatggcggctgccaggcgcaatgcctcgatgctggaatgggccttgatcaggtccaactcctgcgccttgttagcctgctgctgaagctccagcgtttccaggcgtgactggctttccactgtcgcaacgcgcaagcgttcctggagcagggtgcgttcgttttcaatctggctgatgtgctcgctcagcgttgactgctgagcctggtctttacgggcttgctccagcgcagcaaccaactccttcgccgtaacgcggtgctcaatcaacaggcgctcattgtctcgatgcaactgggtgatctcattctgacgcacgatcgcactttgttgggcttggcggatctctgcctgcacctgttgcaactgactttcgtggcggcgctgttcttgttcgcgctgttccttgaccgcatttcggtaatgctccagggcatcccgagcgtgcaagtgcttgtcttccagcgagcgaatctgctcgtccttgtcgttgatcctcagttcgtaatcattgcaagcctggctgagtcccgcatttcgggtttgctcggtttgcaggctggtgcgggtggtttgcagcgcggcgctttcttccgacagagcggcagcctggatctcaaattgttgcttgagttggccgtgtgcctcttcaagtgcttcgacttgggcgagcagggcggctttgtgttgctcgaactgctgcagcgccaagtcaatgggctcctgagccttctccttcaagcgctgggcgagtcgcgccaccagttcgccgagctcgtcgtcaatcggcgcttcagtgatggtgaggcgggtttcgctctcgtccagttctttcaagtagcggtgaatcgtggttttcgagcccgtgttgcccatttcgatgcggactgcatcgatgctggggttctcgcctcgggcaaggatcgccaggcgtgccgtctgaactactgctttatttatgccgccgcgagccatggagtctccgtcgatttagtaccgtggtacatggtatgtagatacatactgtaacacggataaaaacgcgtttaaattcatgatttaacagatgggatattggcgtattatcccgtgtcatcccggctttaatcaccgatctactccttggcagtacgaaagggcccttcatgagcgatatggaccgttacctcaatgcggcgacgcgcgataacacgcggcgcagttatcgcgcagccatcgagcatttcgaagtgagctggggcgggtttctgccggcgagcagcgatagcgtggcgcgttacctggtggcccatgcgggcgtgctggccgtgaacaccttgaagctgcggctctcggcattggcgcaatggcacgccagccaagggttcccggacccgaccaaggcgccggtggtgcgtaaagtgctcaagggcatccgcgccgtgcacccggcgcgggaaaaacaggcagagccgttgcagctcaagcatctggagcaggtggttgcatcacttgaaaccgaagtgaaggcggcgacagaggctcaggacccaccgcgcttgctgcgtgccaagcgcgacacagcattgatcctgctcggcttctggcgcggctttcgtagcgatgagctgtgccgtctggatattcagcacgtccaggctgtccctggcgccggcatcagcctgtatctgccgcgcagcaaaagtgaccgcgacaaccttggcaagacctatcagaccccggcattgctgcgcctgtgccccgtgcaggcctacagcgaatggctgagtgcctcggctttagtgcgcggcccggtgttcagaggcatcgaccgctggggtaacctgggcgaggaggggttgcaccccaacagcgtgatcccgctgttgcgccaggcgttggagcgtgcgggcatccctgccgatcaatacaccagccattccctgcgccgcggcttcgccacatgggcccatcgcagtggctgggatttgaagtcgctgatgagttacgtcggctggagcgacatgaagtcggccatgcgctatgttgaagcgacgccctttctcggtatgacgttggccagcccgcggctgatttgagatttcttctattaatacacatacctaatagggaaaaccaatcgtcagcatcaggtttgccaatgagccatcgccggaaagagtgggtaggattcatctcatcaacttcttaaccctgacggagagtcaacgatgcctatcatcaacagccaagtaaaaccgttcaaagctaccgcgtacaaaaacggcaacttcgtagacgtgtcggacgctgacctgaaaggcaaatggtccgttgtgttcttctacccagccgacttcaccttcgtttgcccaactgagctggaagacctggccgacaactacgccgaattccagaaactgggcgtcgaaatctacagcgtttccaccgacacccactttgctcacgctgcctggcacaacacctcgccagccatcggcaaaatccagtacaccatgatcggcgacccaaccctgaccatctcccgcaacttcgacgtgctgatcgaagaagctggcctggcagaccgcggtactttcgtgatcaacccggaaggccagatcaaaatcgttgaactgaacgacggtggtgttggccgtgacgcttccgagctgctgcgcaaaatcaaggccgctcagtacgttgctgcccacccaggcgaagtgtgcccagccaagtggaaagaaggcgaggccaccctggctccgtccctggacctggtcggcaagatctaagtctgtgaagtcacaagggcgggtttccgcacctaactaagctgcaaccgcccccaaaacgcccgggcgagattcgctcgggcgtttttttgtctgcaataaaccgaatgaacaggaaatcgcccgtatgttggacgccaatcttaaagctcagttgaagtcatacctggaacgggtcacccagccgatcgagatcgtcgcctccctcgatgacggcgcgaaatcccaggaaatgcttgcccttttgcaagacgtcgtcagcctcaccacgctgattacgttgaaaaccgatggcgatgatgcgcgcaagccttcgttctccatcaaccgcccgggtgccgaaatcagcctgcgtttcgccggcatccccatgggccatgaatttacttcgctggtgctggccctgctgcaagtgggtggccacccgtcgaaggccagtgtcgaagtgattgaacagatccgcgccctgaaaggcgagttcagcttcgagacgtacttctcgctgtcgtgccagaactgcccggatgtggtccaggcgttgaacctgatggccgtacttaacccgaacatccgccacgtcgccattgacggcgcgctgtttcaggctgaagtcgatgaacgccagatcatggcggttccgagcgtttacctgaacggcgtgaacttcggccagggtcgtatgggcctggaagaaattctcgccaagctcgacaccagcggcatcgaaaaagccgccgagaaaatcagcgccaaagacgcctttgatgtgctggtggtcggtggtggcccagccggttctgctgctgcgatctacgccgcacgtaaaggcatccgcaccggtgtggccgctgagcgttttggcgggcaagtgctggacaccatgtccatcgagaacttcatctcggtgcaggaaaccgaaggcccgaaactggccagcgcccttgaagcccacgtgcgtcagtacgacgtggacatcatgaacctgcaacgtgccagcagcttgatcccggcaaaaaacgccggtgagttgcatgagattcgcttcgaaagcggtgcgacgctcaagtccaagactgtaattctggccaccggtgcccgctggcgcgaaatgggtgtgccgggcgagcaagagtacaaagccaagggcgtctgtttctgcccgcactgcgatggtccgttgttcaagggcaagcgtgtggcggtgatcggcggcggtaactccggtgttgaagcggccatcgacctggccggtatcgtcagccacgtcaccttgcttgaattcgacagcaagctgcgcgccgacgctgtgttgcagcgcaagctctacagcctgccgaacgtagacgtgatcaccagtgcgttgaccagtgaagtgaaaggcgatggccagaaagtcaccggtctggcctacaaggatcgcgacagtggcgagttcaagaccatcgacctggaaggcatctttgtgcagatcggtttgctgcctaataccgattggctcaaaggtactgtggagctgacaccgcgtggcgagatcattgtcgatgcgcgtggcgaaacttctttgccgggtgtgtttgccgccggtgacgtgactaccgtgccctacaaacagatcgtgattgcagtaggcgagggcgccaaggcttccctgagtgcttttgatcacctgatccgcacgtcataacgtcagccgctgccataaaaaaacccatgagcgatcatgggttttttattgcgcgatacgtttacagcggcgctggttgaataatctcaacccagtacgcatccgggtccttgatgaaggccaggcttttcatgcgcccatcgctcaggcgcttctggaaatcgcagcccagggcttcgaaacgctcgcacgccgccacaatatccggcaccgaaatgcagatgtggccaaagccgcgcgggtcggtgttgccgttgtggtaggcgaaatcggcgtcgttttcagtgccgtggttgtgggtcagttcaagaatgcctggaatcgacttcatccactgagtgcgcgcggcggcgtcggccgggatctgggctttgtccaccagggccagaaagtacaggctgaattcggcttcggggaaatcgcgcttttcaaccagggaaaaaccgaggacgcgggtgtagaagtccagcgatttggtgatgtccttgacccgcagcatggtgtggttaaacacaaagttcgcggtagcggtgtcaggttgggcagtaacgcccgcaaaagtgttcagatcgtgcaggctcatgggccctccagaaaaaaatggggcaaacgcgacttgaaaaatgaggcgcggtccgttggcttgcggcaagcatccatgcagccaagccatgatacgcaaggcctgcccgctgcgccaaatgaaaaaggtcacgcgggccttgcgactggcgggtgcgggggctcaaactttgtcgcttgaaccttgggtgtttttcgcaatgattgaatttcgtaaaccgctgttgagtgccgtgtgtgtgctgttgggtagcccattggtgtgggcggctgacccggaaattcactggcccagcggctggcaggtcgaagaagtcgtccccgacggcgaggcacaggtaaaacctcaagctgtttcccgccagcgcgcgatcaagaatgatgaaaatggcaataccttgatggtcatggagttgaccggcacaccgattgaggccggccataaagttaatcttcagggcgtattgctggagatgcgcaaatccatccagaaagattttgccggtggtggttatcaaagcgtgtgcagcaagatgcaccccacgactttaagtaagctggacgcgctggaaactacttgcgtgattacggagaacggacgccacgtgttgtcgcaaacattggtgggtgcggttgacgctgataaagcctatgttttttcgtacgcaggccaggccgatgcctacgaagccagcaagggcgaagtcaattccgtgcgcgatagcctgaaactttaaatctggcgagcgggtcgattttgaacaaaatgaaacgttggttaagttcgttttcgaaccccgaaaaaaagccccgcattcgcggggctttttttaatccagtcggatcacttgcgcaaccaggattctacggtgtccgcaccgtgctcttctttccaggccttgaggccgcggtggttgccgcctttagtctcgatcagctcgccggtgtgcgggttgtggtaaaccttgactacacgtgcgcgacgttgttttggcgctgcagaggccacaacgccggccttgcctgcgttggggtcaagaatcgagatgatgtcgcgcaggcccttgccgtagctcttcatcagcgcttgaagcttttcttcgaattcgatttctttcttcaggccggcgtcattcttcaaggactccagctgggccagctgctcttgaagggctttttctgctgcgcggaattcggcgagtctggacaaaatctgtactccaatagtgtaatttgctgatatcaactgcagacaaagctataagccaggcgcttataaaacaactcaaagaaagaggcctttctgcgagtctgctcaggcaggaaaaattgtagtagttaatgcgctacgagtaaatcacgtcttttgtctaaataagatatttcatccagcgccgtagctggctattcaatggctggccaaagatttaataaactcggcacacggcaatggtcggccaaacagatacccttgcaggaaatctaccccctgcgccgccagatattcgcactgttcggcggtttcgacgccctcggccacaatgcccaggtccagcttgccggacagttctatgatgctgtccagaatatgccgcgagagtgcgtcagccccaatcatggcaacgaaactttgatcaatcttcaagtagtccacattaaaattgcgcaaataacccaggctggaatggccggttccaaagtcatcgattgcgatcatgacccccagttgatgcagcgcttcgaacaggcggcgggtgatgtcggtcggttcaatcagctcgcgttcggtcaactccagcaccaaggtgacctggccaggggggaaggctgcgagaaattcacggcagtcatcgaccaaggccaaatcctggcaatgacgcgcggtaatgttcacaccaatatggaagcccggcgagaaacgcccagcatggggcgcaagttgcgcagctgtctggcgcagcagcgcccgggtcatgggcacgatcaaccccgagtgctcggccagtggaatgaacaggtccgggcgtaccaggccttctttcggatgctgccagcgcatcagtacctcgcaaccggcccattcgcgggtatcgccgcgcaccaccggctggaaatatggaatgaactcattggcacccaacgcacgctgcagttcgtgggtcggggctgatgaacgcttttgcagccaatgcgccaaagtgcctgccagcacgccaaaaaataccagcaagctgaacagcgccgggtagcgagcttccatataacgccacacctcaccggcgggcatgccggcatcgacgctgtagtgatagcgcgcggaagccagatgatgatgggccaccgggaattgcggcacggcctcttcatggactttaccgtcggcatccagccagttcggcccgacttgcagaaccaggtgtgcgtagcggctgataaggcgcaaagcattggtcagatggtagccgtcaatggacgcaaacgcggccttgtcgccctcgaccaagcggtagaccagcagcgccgtatccggcgttaccgggttgccattcatcaaccacagcgtgccatctacataatcatccgggttcaccggtgactggtaatggtcgccgaacagcgaactgcaatagatgttcttttgccaggacaacgttgtcgctcgtacaaagggccgacgcgtcacttgctcgcgtagcgccagttgggcgccgttgtcgcacggctgacctgccagcggcagcaagctctgcgcggcgagggccgtgttgttgagcatcaggtcaaactggcggactgcctcctgagcggtctgcgcggtgctttgctccagggtccgctcagcttgccagtgcaggatgaccacccccagcgcaatcggcagcaggccgctgaggccggttatcaagtagcgggtggcgcgttttcgcgggccgttgacagtcaggggcatgggtataacggcctgttgcaaggtgaggaaagcgccgaagggccaatcagatgaatcgatgatagatggcccgcaggaaataagctcgccgcacctgaccgtttagtggggggcggcgactagaaatccatgccttgtgccagcgtgatgaacgcccgcgctgccggtgttgattcacgttggtccagcaccgccaggccgatttcacggctcacggcaggggaaagcggccgcacctggtagcgagggtcagctgcctcgggcagtgacgcctgcgccaccacgctgacaccatcgccccggcttaccgcttctacagtgctgagcaactgcgaatagcggtaacgcacgttcggcgtgagccgcgctgtactgaacaatcgtgaaaccagctccagcgagcccgcttcagtcaggataaaggggccctcacacaaccccttcagcgtcacgctgggctgtgcgcaaagagggtggccagagggcaatagggcaaccatctggtccttgaacagtgcgaacgtatcgaaacgctcctgctccagcaccacaaaccccacgtcaatgcgccgttcctccagccattggatcacttggcggtccgggccttcgtctacatgcacttcgataccgggatgttcgtgccgaaacgccttgagaatgcgcggcagcaagcggttggacgacgtcgggccgaacgagccgatgcgcagcgtgccacgcttcatgccgcgcgcatcggaagcttcctgttgcagggtgctggccacaccgagcagggtgcgtgcgcgcatcagcaattgctggccgatatcactgagttcaacctgggtttgatgccgccgaaacaactcgacgccaagttccagctcaagtgccttgatggcatgggacaccgcagactggctgatccccaaacgatgggcggcgctggtaaaaccctgcaactcggccacgcgcgaaaagatttccagctgggtaagcgtcatgagtgtttactcattttacgatgattgatcattagttggaggatacgccaatcctgatcccaaaagagcacgtattgatgacgcattcctctgaccgcctgacctacatgaagctcgcttcggtcaccatgatctggggcgccacctttgtcgccggccgctacctggcagccggcgtagatccgctgctggcgtcgacgttgcgctttgcgctggccagtgcggcgttactggtattcctggcattggcccggattcctctggttcggcccagcgccaggcaactggtgcagttggcgatgctgggtttcttcggcatttacgtttacaacctgtgctttttctacgggctgcattacatcaatgcatccagggcttcgctgatcgtggcgttgaacccggccgtgatcgggctggcctcctgggtgttgttcaaggaacgcttggggcaggccaaactgatcggcatcgccttgtgcctgggcggtgcaggggcggtcattttcagccgtaacccaaagcttctggacggtgccgtgcatgcctgggtcggtgacttgctgatttttggctgcgtggcggggtggggcgcgtactcgctgttttcccgtggccttaaccagtcgctgggtgcgttgcagacggtgacctggtccatcttgctcggcaccttgatgctgacaatgaccagcgcactcagtggccggctgacatctgccgcagtacacgcgatcgcgccggcacaatggctgagtctgctttatctcggcgtgctgggctcggcagtggcttacatcttctggtacgacggcatccgccacatcggcgcaacccgggcaggcgtctttattgcccttaacccgttgacggcggtcgtctgtggcgcggtgctgctgggcgagcaactgacgctgtctatggtcgtgggcggggcggtgatcctgctcggcatctacctgtgcaacaaaccccttgcacagccgcaggcaatggggatttgataagagtacggacaaacgctgttacgctgtgtagaatcgatttacgcatacaagaatatggacttgcgctcacgcaagcctcggccgtcagagactgatgacaccatgaagctactcggctcccccctcatctttggtgacttcctcgcccgcagcgtgcgagggctctcctgtgcgccaccctgccacctcatccttgctcacaagtaactctttattgactacaagaatgaggcgccaacatggccgaccaatacgaaaacccaatgggcctgatgggttttgaatttatcgaattcgcatcgcccactccgggcaccctggagccgatcttcgagatcatgggcttcaccaaagttgcgacccaccgctccaagaacgtgcacctgtaccgccagggcgagatcaacctgatcctcaacaacgagcccgacagcctcgcgtcctactttgcggccgagcacggcccatcggtgtgcggcatggcgttccgcgtcaaagactcgcagcaagcctacaaccgcgcgctggaactcggcgcccagcccatccatatccagaccgggccgatggagctgaacctgccggccatcaagggcatcggtggcgcgccgctgtacctgattgaccgtttcggcgaaggcagctcgatctacgacatcgactttgtctacctcgaaggcgtcgagcgcaacccggtgggcgcgggcctcaaggtcatcgaccacttgacccacaacgtctatcgcgggcgcatggtctattgggccaacttctacgagaagctgttcaacttccgtgaagcgcgctacttcgacatcaagggcgaatacaccggcctgacgtccaaagccatgagcgccccggacggcatgatccgcattccgctgaacgaggaatcgtccaagggcgcagggcaaatcgaagagttcctgatgcagttcaatggcgagggcatccagcacgtggcgttcctcaccgacgacctgatcaagacgtgggacgctctgaagaagatcggcatgcgcttcatgaccgcgccgcccgacacctactacgaaatgcttgaaggccgcctgccaaaccacggcgagccggtggaccaactgcaggcacgtggaattctgcttgatggttcctcgattgaaggcgacaagcgcctgctgctgcaaatcttctcggaaaccctgatgggcccggtgttcttcgagttcatccagcgcaagggcgacgatgggtttggcgaaggcaacttcaaggcactgttcgagtcgatcgagcgtgaccaagtgcgtcggggtgtgttgaccgccgactgacctataaaaaagcccggcttcggccgggctttttattgcctgatattcaggctttgcgctgacgtaccagatgcttgaagccttcgtacaccaataccatcaccgccagccagatcggtatataggtcaaccattggccgcccttgatgccttcgcccaatatcaacgccaccgccagcagcagcaccggttcgacgtaactgagcagcccgaacaggctgaacggcagcaagcgactggccacgatatagctgaccaacgccgacgcactgatgacgcccagcaccggaatcagcgcatacagcttcggatgaatatccatcaccgcaaagccttgctcgccatgttgcacaaaccaccacgccaccggcagcatcagcgccatgtccagccagaggccgccaaggtggtcagtcgtcaggcgtttgcgtacgacaaagtaaatcgggtaaccgatgatcaccacgagggtcgcccaggaaaaaccaccggcctgatacagctcattcagcacgccgagcgcggcaaaaaacaccgcgatctgctgcaaacgcgacaagcgttcgccgtacaccaggcgcccggtcagcaccatggtcaaaggcagcaggaaataccccaccgacacatccaggctgcgcccattcagcggcgcccacatgaacagccacagctgcacgcccagcaatgccgatgacaccagtacgccgccgatcaagcgcggcttggctgccagcattcgcagcagttcccagacccgccgccattcgccgctgaccatcatgaacacggtcatgcacggcacggtcagcagcatgcgccagccgaaaatttccaggccactcagcggcgtcaacaatgatgtgaagtaatacatcacggcaaacaacaccgaggccaggaccgataacacaacacctttagacacactgtcctcgcgaaaacgattgattcagaagagtgaggattatggtgcttttggcgggggaaggttgcgctgttttgtggtgagcgggcttgccccgcgctggagtgcgcagcgctcccgtttttgaggccgctgcacaggccggcgcggggcaagcccgctcactacaaagttgctcaatatcggtagcttttagcctgtcagcgcgccacgcgcccggacacaaaatggctgacatcattgaaccccggcgtggacgaatgccccggcgtcaccagtgaatcaataaacgcctcatcttcggccgtaatcttcacctccagcgcgcccgtgtaggcatcccactgcgcctcggtgcgcggcccgacaatcgccgagctgactgacgagttgttcagtacccaggcaatcgcaaattctacaatccccacgccgcgcccctgggtgtactgctgaatctgctgggcgatgcgcagcgattccacacgccattcggtttccagaatgcgcttgtcctggcgtgccgcgcggctgccggcttcgggggtgacatccggcgcatatttgccgctgagtacgccacgggccaatgggctgtaaggcaccacacccatgccgtaagcagcggcagcggtgatttgctcgacctcggcctgacggttgacgatgttgtacaacggctggctgataaccggacggtccacacccagacgttcggccacacggatgatttcggcaatgcgccagccccggtagttggacaggccccaataacgaatcttgccctggcggatcaggtcgccaattgccgacaccgtgacttccagcggtgtgtcgtggtcttcgcggtgcaggtagtagatgtccaggtagtcggtatcgaggcgtgacaggctggcttccagcgcattgaaaatacgcttgcggctcaaaccgctgcggttcggcaggccgtcggttgggccgatggcaaccttggaggccaccacccagtcttcgcgatgacgggcaatcgcctcgccgacgatttcctcggaacgcccgccggtgtagacgtcggccgtgtcgatgaaattgatgccttggtcccaggccttgtcgatgatgcgcaacgagtcttcggtattggtttgttcgccaaacatcatggcgcccagggtcagcgcgctgaccttcaacccggactggcccaatgtgcggtaaatcatggaaagctcctcatggcagggaaacgtgggtatgcaatagcagactcaaccgctctggaacaaccccttggcgtgtttcttcattcacacagcaaggcctgacagcgcgcctgtaaaaatcggtgcagcactttcacccgctctgacacttgcaggcggtgagggcacatcaggttgaaaggcgtgggttcgcctttccagtccggcagcaagggcaccagccgcccggccttgatatcgcgggcgacatccaggttggctttgtaggcgatgccatgcccggccaaggcccagcgccgcacgatttccccatcgtcactcaggtaatcgcccgacacctcgacctcttgcagcagcgtgccctggcgaaagtaccaggtgttattggcctgcccccggcgcaggtagcgcagtgtgctgtggtgcgccaggtcagccggtgtctgcggcgtaccgtggcgcgccaggtagtcagggctggcgcagggaatgcggtggtggtcgggcaccaccggcagcgccaccaggctggagtccctcggcacaccaaagcgcagggcgatgtcgacagtgtcgcggaacaagtctgcattgctgtcgttgagcaacaattgcaggcggatatccgggtgttcgagcttgaactcatccagccagcccagcagcacattgcgcccgaaatccgagggcgcagccagttgcagcaagccgctgaggctttggccttgctgcttgatggcgtgctcgccttccgacaaggcttccagcgcaacccgcacgctgtcgaggtagcgtcggccttcttcggtcaggcgcatgctgcgtgtggaacgagcgagcaggcgcatgccgaggcgggtttccaggcgtttgagggcaatgcttgcggcagcgggcgtcaagccaagcccgcgcgcggcggctgaaaggcttccggtgtcagcagtgcgcacaaacacttccagatcaaggattaagctcatttgtaaaaatcctttaaagatcttgtcgttttaccgggatttttcgccgattgccaagcgcggaagatgaacgctcactttctgattcaggttttctctcatgacatcttccctaagtggcaaaaccgtcatcgtgatcggtggcagcagcggcattggtgctgccgtggcagaggcagcggcggcccgtggtgcccacgtggtgctcgccgggcgccgcctgatctcgggtgtcgcaaacggtgtgcgcagcgaaccggtcgatgccaccgacagcgcctcgctgcagcgtttgttcgagaccgcagggcgctttgaccacctggtgtacacctcgggcccgacggtgcgcgccaagcccttggtcgaaacggacctgaccgaggctcaggacaatttcaacgtgaaactctggggttcgctgcgggcgatccagctggcgctgccgtttctggccgagcgcggcagcatcagcctgacctcgggccaactcggtcgtaaattcgtggccggccagttcatcaagaccggcatcaatgcggccaccgaagcgctcggcaagcaactggccaaggagctggcaccgcgccgtgtgaatgtggtcagcccgggggtgattgatacgccggcgtatgccgggttggctgaagaccagcgccaggcgatgtatgccaaggccggcggggcgttgccggtggggcgtgtggggcaagcggcagaggttgcggcggggtatgtgctggccatggagaatggctttatgaccggcgcgatcatcgacatcgacggtggcgggttgctgtaaacacagtacaaaaatgtgggagctggcttgcctgcgatagcggtggtgaattcaccgccgctatcgcaggcaagccagctcccacattgatcgtgttacgccttcaaggtacgggtcatgcgcagcgccaacacactgccggccacaatcaccgcggccaacagatacaacgccatatccgtagacccggtggcatccttcacaaagccgacgatgtaggggctgaggaaacccgccatctgccccatggagttgatcaacgccaaaccacccgccgccgcacctgcgctgagcagggcggtgggcaccggccagaacatcggcaggccggtgagggcgcccatggtggcgatggtcaggcccagaatcgcgatggccggggtggtggcgaaattcacggcgatcaccaggccaatggcgcccatcaacatcggcaccaccaaatgccaacggcgctctttgcgcaagtccgccgaacgccccaccagcagcatgaacaccgcagccagcaggtaggggatcgcgctgagccagccaatcaccaggttatcgctgaaccccaggttcttgatgatcgacggcagccagaagttgatcgcgtacacgccgctctgtatgcagaagtagatcaggccgaacgcccagatggccggatttttgaacacttcacccagcgagtcgctggtggttttcggtttgttggcgaggtctgtcgcttggtcggcttccagcaccgcccgttcgtggggcttgagccatttggcgtgggcaaagctgtcgctgagcaagaagtaggcgagggcgccgaggatcacggtcgggatgccttgcagcaggaacatccactgccagcccgcaagcccgtgctggccagcggcaaagtggttgagaatccagccggaaaacgggctgccgagcaagccggatactggaattgccgacatgaacagcgccatgatccgcccacggcggaaggtcggaaaccactgcgagaggtacagcaccacgccggggaagaagccggcttccgccgcaccggtgaacaggcgcaaggtgtagaaatgcgtgggcgtggtcacgaacagcaggcaggtggacagcgtgccccacacgatcatcatcaaggcaatccagcgccgtgggccgaatttggtcagtgccaggttgctcggtacgccacacagcacatagccgataaagaagatcccggcacccaggccgtacacggtttcactgaatttcaaggcatcgagcatctgcaacttggcgaagccaacgtttacccggtcgaggtagttgaacaggtagcagatgaaaatgaaggggatcaggcgcagggtgatgcgcttgtagatggcgtttttatcgtcatcggtggccagtgtggcagcggcgctctgtgacatggcagtctctctttattatgattttttgcgatgcgagggtaacgtctatcgccagacgagtctcggccaccttgcccggtgctgtctttgtgctcgcgcacagtgaagcatgatttgcgctgtgcctatgaacaaccccgccttttaaggaagttagcttcatgttcgagctggatcatgacctggcgcaggatattgtcgatcgcaccatggccatcctgccctacaacgtcaacgtcatggacagccaggggctgatcctcggcagcggcgagcccgaacgcatcaacacccgccacgagggcgcgcagttggtgctggccaatggtcgcgtggtggagatcgacggccagaccgccaagcacctcaagggcgtgcagcccggcatcaacctgccgctgatgcacgaccagcgcctgatcggcgtgctgggcatcaccggcgaaccggagctgctgcgtacctacgcggaactggtgcgcatgaccgctgaaatgctggtcagccaccgccaccagcaggccgagcagcaatggcggcgccagcgctgcgacgacctgctggcattgctgctggccgacgggggtgactcaccgcgcctgatcgacgaggcgcagcaactcgggctcaagccgcaactggcgcgcacgccgtacctgtttgaactgggcgccggccagtcggcggacgcgctgagcgcctggctcagcagccggtacccggacagctggtgcgtgagctccgcgcaattttccctgctgtggtgccgaccggctgccgtgcaagtcgacaacaccaagctgctggaaaaaatcgccggtcttggctggaacatcttgcgtgtggctgtcggcgggcaggcggagggtttgacggggctgcggcgttgttaccgccgggtcggcgatttactggcttacgggcgcgacattcttcccggttcccgcctgctgaccctcaatcggtatcgcctgccggtgatgctctggcgccaccgcaatgacgatgccctcgacgaattgctcagcccgttgcgcaaggtgctggccaaagacagcaacggccaactccttgccaccttgcgcagttggtgtgaacacgatggccaaagccaggcttgcgccgacgcgttgggcattcaccgcaacagcttgcgttaccgcatggaacgcatcgcggagctgagcggcgtcgacccgctgaccctggacggcatgcttgcgctgtaccttggcgtacagctattgccccaggctttgtcggaatgaacaacaaacctgcgccgtacttgtgcatcggaccggcgtcattatcccggccaactggcagcatgggcgttataaaaaccggagaaagcccatgaaaatcatcatcgcccccgactcgttcaaggacagcctgagtgccgaaggcgtcgcccaggccatcgcccaaggcctggctgaggtctggccggatgcacagattgttcagtgcccgatggccgatggtggtgaaggcacggtggattcggtactcgccgcgtgcaatggcgaactgcgccggcaaaccgtgcaagggccattggctggcacggtacaagcacgctggggctggttggccgacagccacaccgcgattattgaaatggccgaagccagcggtttgcaattggtgccgccgggcaagcgcgatgcctgtaccagcagcacctatggcaccggcgagttgatccgggccgcgttggacctgggcgcccaacgcatcatccttgcgattggcggcagtgcgaccaacgacgcgggcgcgggcgccctgcaggcactcggcgtacgtttgtttgacgcagacgaccagccattgccaccgggcggcctggcccttgggcgtttggcgcgtgtcgaccttgagcaactcgaccctcgtctggcccgcgtgcgatttgaaattgccgccgacgtgaacaaccccctgtgtggccctcacggggcatccgccattttcggcccgcaaaaaggcgccagccccgagcaagtccaacagctggacgccgcccttggcctcttcgccgacagatgtgcccaggtgctgcccaaagacgtacgcgacgagcccggcagcggcgccgctggcggcctgggttttgccgccaaggcgttcctgggcgcgcagttccgcgccggagtggaggtggtcgccgaactggttggcctggacgaggccgtttgcggcgccgacctggtgattaccggcgaaggccgtttcgatgcccagaccttgcgtggcaaaaccccgttcggtgtggcgcgcattgctcaacagcgcaacgtgcccgttattgtgatcgccgggaccctgggtgacggttacgagcagatgtatgcccacggtgtggacgctgcctttgccttgccatccgggccgacgacgctggaacaggcctgcgccgaagccccgcgcctgctgcgcgagcgcgcagcggatatcgcacgggtctggcgcgtggctgcacggggttagcgctacagcctccgtgccgtaacgcgttcaacactgtgggttcagtctgaggcgtagcaaatcgacaggcgcccctcgcagtccggcaaccaatggatgcccaatgccggtggctgtttggtcgcgcatgcgccgatggctaacaatcccgcgacacaaatgccgacagccaatgcccgttgctttatcacgtgtgggtccttcatgtggttcaagaggtccccggatactgcacgcacggcttcatcggcaatgtaggactcatttgatgttcacgggtgattacgcgctttccatagcacgcgcgtggcctctacactgggccgccacgtgtttttcaaaggatgaaacacaatgcacgcacccgaactctctatcgtgatccagcgcttcaccgaggcccatctggaaggcgtcgctgcgctctacaacgagccggaggtgtgccgtcaggtgctacagatgcctttccagtcggtggaggcgtggcgcaacaagctggagctggataacgagcggcggctgcagctggtggcagtgcatggcggcgaggtcatcggccagctcggtctggagcagttctcccgcgtgcgtcgcagccatgtcggttcgtttggcatgggcgtggcgacggcctggcagggcaagggcgtagggtcgaagctgctgtcggctgcgctggaggtagccgacaactggatgaacctgcaccgcgtcgaactgacggtgtacgccgacaacgaagccgcgcaaaacctgtaccgcaagttcggctttgaggtggaagggcggctgcgcgattacgcggtgcgcgatggcaggtttgtcgacaccttgagcatggcgcgcctgcgcaaatcgggttaaccccccaaagcaaacgccaccgcagcctgcgcatgcagctcggtggtgtccaacagtggcaggtcactgtgttcgggcttgatcagcaagccgatttccgtgcaccccagaatgatcgcctgggcgccgcgcgccgccagggtttcgatcacgcgttgatagacctggcgtgaagcctcgctgatcacaccgacacacaactcctcatagatgatccggtgcacggcctggcgctcctcagcgtcgggcaccagcacggtcaaaccctgcgcggtcaagcgcgacttgagaaagtcctgctccatggtgaacgcagtgccgagcaaaccgaccgtcagcgtgccggcttgaacggcggccgccccggccgcgtcagcaatatgcagaaacggtatcgacaccgccgattcaatacgcggcgccaccaaatgcatggtgttggtacacagcaccacgcagtcggcaccaccggcttgcaggcggcgcgcggcgtcttcgaggatcagcgcggtgtcgtcccagcgcccggcatgctgagcctgttccaccgggccaaaatccacgctgtacatcagcagttgcgccgagcgcagcgggcccagcctgtcgcgcacgtgttggttgatgatgcggtaatactcggcgctggactcccagctcatgccgccgatcaggccgatggtgcgcatgtgatgctccggacaagaaatgtcgcctcaccttaaccatcggccgcagattagtcatacgcagttgcacaccaaatcaccggtgcagttggccgatccggcgttaatcccacggcgcgccgccgcatctgccatgatcgggcttcgcaatctggctcacccaaggaaatccgcaatggacgacgtacaacaactgggcgagatgcttcgtcactacgccgacagtgaagcgcacaagaaacagcaatttgatgttcagtccgcgcgctgggcgcagaagcttggggaattgttcgggcagattgaacagtggctggaaccggtcaaaagcgtggggctgctggaggttcatcgcgaggcctacgttgccagcggccccggcgttccactggagacgtcgaccttcaagactgaaaagctcaacgttcagatcactggaaagtccgtggaattcgtgccggaggtgatgggcccgggcggcctgatttcggtctccgtcatgggcctgacggccgcccgccacggcagtgtttcactggtgttgcccgccgataaaaacgactggctctggaagaaaaccaacggcctgaaagacccggacaccttcggcttcgacgccaacttcctggcctcgcaactgcaaagcctgatcccccgcgagcgtgcctgagccgcctatttcaacgcggggtcaccggggttgagccgcttccaactctgcatgacggcctgcgcctttggttcatgaccgttttccaggtagtactggatcagcgtcagtcgcgcattacgattgtacggctggcgttgcaacaggctttccagctggttgcaggcttcatcgaccttgccactgtcgtgcagggccaccgccagcacaaacgcgaactggccgttggcagggtcaagccgtgcggcgttgcgcaggtggggcatggcgccagccacatcacccgcccggatcagcatcaggccctgggtgtgttgcagcagcggcgcatcgggctgccgggcgagttgttcggtgatcaggttgcgcgcttgcgcagcacggccattggcctccagccactgcgccagggtgaccagcgccgggtagaaatcaggatcacgcagcagggcagtgcgcaattgcgcttcgaccgtgtcgccacggccactggcctggtaaagcatcgccaggttgagattggcctcggcgcgctccagcaggctcagttgtacctgctcatattcggcgatggcgctgtcccaggcggggccgagcccctgaacgcccagcaagttccgcgccgccacgatgcgcacggcacgcaccgggtctttgagcagtgggccgtagagcgcaacccgttctgcgggcggcagcagggcactgaccgcgcgcacggcgctttcgcgcacttggggggccgggtgggcgaggtctttggttgcccgtttcaatgcctgttcgctggggtagttggggagctcaaccagcaaggtggcacgctggatggccggcaggttaccccgtgccaactggtcatacagggcctgggccgcacctggctcaccgtttcgaatcagcgccatgctgtcaccgtacgtcggcgcccggagcaccgactgcgcggccggcggaatactgaagctgtggtcatgccgaaagtcgttgcccatataaaccttgccgggcatatggcaatcgacacagaacgaacccggctggccgacgtcgagcctggtgtgttcgcgggagttgtagtccttggcctgcaacccgcggccatccaccgtggcgaacggggttttacctgccgggttatggcattgcaagcacaccgcattgcccggcgccttgagttcagcgctgtgggggttgtggcagttgctgcaacgcacgcctttctcggccattttgctttgggcgaaggagccgtgttcgaacacttcatccttgatcttgccgtccagggtgtacagctcgcgggtcagcacgcttggcaggtagtcgtccatcaggcgcttgcccacggtaaacccatcgcccagcggggcgcgacgggcgtggcagcgggcgcaggtttcgagttcgacggtggcgtttttgtctttcaaatccacggcgaaaccggcgtgcagcaaatcgcctttttttgccgcccactgcacatggttcgatgccgggccatggcaggcctggcaaccgacaccgaggctgttccactggctgtcgaagctgtttttttccgggttgaagttacgtgtgtagccggtggtgtgacattcgacgcacatgaagttggcgttctggctcggtttgctccagtgcagcgggttcttgaagttgacgccctggcccgggtagaggtggaaccagcggtttttctcggtatcccacgccacgcccagtgcttgcaggcggccgtcaccgacctcgaccaggtattgctgcaacggcgcgatgccgaaggtgtacgccaccttgaaatcggcgttttgaccatccacacctggtgcgttcacccagaattcgtcgccccggcgaaagaaccgcgtggtttcgccttcgccggtaaaggccgcgtcattgaagtcggcgggcactgtctgtggcgtggccctctgcatcgcaagctggtggtgggagccttgccaatccctggcctgggcctggtggcagccctggcactgttgctcatcgaccatgcttgccggcgcgataacggccgccggcttggtcgtcaccaccggcgccggtacacgcaactgaggcgtggaggtttgcaggaacacccagagcccggccatggccgacagcaacagtgcgatcaatacagggtagaggtaacgacgaggtgcaactttatggcgctcaggctctggcattgcgacttccgttgtcttgatgcgtggacgctctgcggcgtgctttggctgtgtgcagctttgacgctgcccccgtgtctgtcaaacccatggcctgaaataacggctatttccccagagttggctatacctacagctcagtgtttcgacgatgatcgccagggagttcaatgatgaaatcaaggctaatgatcagcacactctgtgttgcctcactcgcaatggcaggctgcgccagcaaggtgacccaaccggacgaatactccggtttcctctcggactacagtcagctcaaggaggccaagtccccttcgggtgccgaggtgatgcgttgggtcgatcccaacctgaacctcaacaactacaacgcagtgtttatcgaaccgacccagttttaccccaagccgcaagccaccacgaaaatcccggacagcaccctcaatggcatcaacgcctactacaaccaggcgctcaagcgtgagctggtcaagtcattaccgttggccagtgcaccgggcccgggggtgatcgtggtgcgcgcggcgattacggccgtgagcagcaagaccgaaagcctcaagccctatgaatacattcctgtggcgctggtagcggcggcggtgagtaccggcaccggcattcgtgatcaggaaaccacactgggcaccgaagcgcagtttctcgacggtgccagtggcaaggtactcgcccaggtcgtgcgtaaaggtaccggcaagccgctgtcgaatgactcgcaggtgatgaaggccgatgacgtcaaaggcgtgatcgacggctgggcatcggacctgcatcaatcgtatgtgaaactcaagggcaagtaaggcccgttgcgacgagggtggttgcaccctcgtcgtgcttcactggccaccaaaccagcggtaatacgggttggcggcatcctcacgcaagacctcgcgaagatcccgcccccaggcctcccggtcaccgtcgtaggcatgcaggctagcactgtaaaactgcatcaggcgctgctgttcggcggcctgggtcctgatgaaagactcgtgcgcgttgaccagcggcgcgggcacgcgcaggttcagcagggccggcaacacccgggtgatttccttgctgcgcacccacggcgcgtattcgatgcgcggcctgtcatcggtgaccgccagcgcgctggcggcaaagcgctcaagcccttcacgatccgtgacccaggtggcgagcagtgtggccgccgaatcaataccgacttcggccagggcgctgcgcaccgtcggctgttcgaagcgctggcggatgcgttcgacgtccagcactatggggtcgcgcgaacctaccagcaacatctcgtggaactcgctggtccacagcgaggcatacgggaacacgttgaggaagctgcgcaccagcgcgcgggagtcgtcgatgttttgcgtgggtaatggcagccattgggccagcacaccgtttgtttccaggcgcgcggcggccaaccggtagaagtcctcggaatacaggttgaccacaccggcggcggagggcggtggcggctccagggtgatcaagtcgtaggtgtcggggttgcgcagcaactcctggcggccatcgcgcaggcgcaggtcgatagagggatcgctggccgcgttgaagttgcctttgaacaagggcgcggcttgcaccaccgagggcagcagctcggcgactacccggcgctcaaggcccgggtaacgcagcaaggcgcctgccgtgatgccggtgccgaagccaatcaccagggccgatttgggctctgcgttatgaatcagcaagggtaacaacgcctggatccgcatgtagcgcagcgatggcatggcgtcgccagtgttcgacacaccctggatatacagacgctgaaacgctcgtgcgccctggccttgggtgaccaccgccacggttgctccacgaccttcctcataaaacgccaggctggcattgcgtgcccccggcagcaatttggccaggcgatccacaggggtcagcagcgccacggccagggacagcaaccccagcacgaccaccgcctgacgccggccttttttcaccccatggccacggcgcaccgccacatagcccaccccaccggcaaccactgccagcaggcccaaggtgcgcaccagccccagccacgggatcagcacaaagccgcacagcatcacaccgagaatcccgcccaaggtgttgaacgccacgacggcgcccacatcccggccgacatggcgctcgcccacactcaaacgcaacgccagtggaaaggctgcgcccagcaacagcgtcggcacaaacacgatacacagcgccgcgacggcaaagcgcgcactcatgccgggcagttcagtgccgcccaggctcagcaccagggcttcggcctgggtttgcagcaggatcaaccagcggcccagcagggcaatttccagcaacgccaccaaacctgcgcccgcaatcagcaaaccgaaccccccccaggggtcgcgaatgcgttcaacccggtgcgacatccactggctgccgataaacaagccggtcaaataggtggccaacaccaccgcaaacgcataggtgcgcgtgctcatgaactgcacgatggactgcgaccacaccacttcataacccagggcgacgcccccggcgatggcgtacaacaccagtgccaaccgtttgggtggtgcctggcgaagcggttcgatcgccaccgccaactgattgcgtacgtacaacaaagcgcccacggcagccgccagattgagcactgccgccgccagcgcactgccacgcacgccaaactgggcgatcagcacaaaggccgtgagcaaggttcccgcaatcgctccagcggtgttggccgcgtacaaacgcccaccggcctggctcaagcccttggcttgagggttctgcgcacggaccagcaccggcagcgtgccccccatcaataaggccggcaaacccaccagcacaaacggcaatacccaggccagcaacccggctcgctgctccagccaggcaaagggttcggccgccacgcccagggccagcgttgcgcagactccgaacaaagccaccaataattccagccctgcatacaacaacaggggccgcgcaaaacggtctgccaggcgcccgaacagcaggcctcccagcgccagtccggaaaaaaaagcgctgatgccggtggtgatcgcatacacctccacgcccaccaccagcgacagctgcttgatccagagcacttggtacaccagtgccgccccgccggaaatgaacaggaggagggcggggatcagggttgagggggtggcgatttcaagcggtttactggcggtacgtgaggtcattacccgattccaaataatgcgcaaaaccctgtgggagctggcttgcctgcgatagcgtcgctgaattcagcaccgtcatcgcaggcaagccagctcccacataggccttttgtcgagtcaatcaggaggccggtgccgccttcatcttcgcttcaatcttcttgtccaccgcctcgcggatctgatcgatgctgaagctcggcggtttctggctgggcgggtactccacaaaggtctcgaggaatttcgccgccttcgttaccgccactgcccccaggtagacgtttttagtggtccagtcgtaatactggtcactcaccacgtcggcgcgctcatacgggtccatcctcaggttgaagattttcggcacccgcaattgcacgaaaggctcgctccacacgcgaaaaccacccggctggcgttgctcggcgaacaccactttccagttatcgaaacgtatcgacaccagcatgccgtcatcgttgaagtagaagaactcgttgcgcgcgcctttgggctgctggccggtcaggtacggcagttggttgtagccatccaggtgcactttgaaggtggtgccgcccgaagtgggcgcccagcctttgagcagtttgtctttcacgtcggcatccccggcggcggcgagcaacgtgggaaaccagtccatgcccgagaccatctcgttggagacttcgccctgtttgatcttgcccggccaacggatgattgccggcacccgataggcgccttcccagttggagtctttctcgttgcgaaacggcgtggtcgccgcgtccggccaggagaactggttcggcccgttgtcggtggtgtagaccacgatggtgttgtcggcgattttcaggtcgtcgagggtttgcaggagtttgcccacatcgccgtcgtgttcgagcatgccgtcggcgtactcgttgccgggcatgccgctctggcccttcatcgagtcacgcacgtgggtgaacacgtgcatgcgcgtggtgttcatccacacgaagaacggtttgttggcctcggcctgtttcttgataaacgcctgggccgctgcggtggtttcgtcgtcgatggtttccatgcgcttggtggtcaaggcgccggtgtcttcaatcttgccgtcggcgaagctgtggatcacgccacgcggggtgttggctttgacgaactccgcgtcgtccttgggccagtaagggcgttccggctcttcttcggcattgaggtgatacaggttgccgaagaattcgtcgaacccgtggttggtcggcagatactcgtcgcggtcacccaggtggtttttgccgaattgcccggtggagtagcccagggacttgagcgcctgggcaatggtgatatcacgcttttgcaggccgaccggggcaccgggaatgcccaccttcgacaggccggtgcgcaacggcgtctggccggtgataaaggatgaacgcccagccgtgcagctgttctccgcgtagtaatcggtgaacatcatgccttctttggcgattcggtcgatattcggggtcttgtagcccaccacacccatggaataggcgctgatattggtttgcccgatatcatcgccgaatatcaccaggatattcggcttctcggcggcccaggcggatgccgagacccccatcaccgaaacggccaccagggcgagcttcggcagccacttacgcatgcgagtcataagacttgctcctttcagggcttgggtcgcagtgtctgcgaccaacgtttttttacagtccgtcgtgacgtttttcttattgcaccttcgcttgcacagccggctcgaaggggtagatacggttccactcggtcgccatgtccaccacggtccagccttttgttctggcttcctccagcgccttgtccaggcggccgatttgagagttacggtcataggcccactcgcgcttggcgtcggtgtggtgcaccaggcccatcaagcgtttgccttggccagccgcggtccactgcagcatttgcaggtcgccgtcggagttgccgaaggccaggatgggtcgccgaccaatgatcgcgtcgatactttccggcttgcccgggccatcatcgttgtgggccagcttggcagtgcgcagcacttgaggctggccgtccttgagctggaattgggtgacaaaactcgacccgatgacctgttccggcggcacgccatagacctcctcggcaaaggcgcgcatgaacgcggtatcaccgccggacacgatgtaggtcttgaattgctggccgcgcaggtagtcgagcatttccagcatcggctggtagatcatctggttgtagggcttgccggttttcgggtggcgagcttgtttgagccagcttttggcattgtcgataaacgcctgggtactgatgccggtatgggtcgcgccgatgattttcagcaagccttgcatgcccgatgcagcgagtgcctggtggtcaccttcgagcacggccttaaacggctgcgtggtgttccattccgggtgttgcggggcgaggcgcttgacttcatcgaaggcgaacagcacttcgaagtaggccggttgctcagtccacaaggtgccatcgttatcgaagacggcgatgcgctcggcaggcttgacgtagtcttgggagccttcggtggtgacggcctggacgaacgcgatgatctgttttttgctcgggccttcgttccatgagggcagtgggtcggccgcaagcgccggcaggcaaaacaataaaagcaggggcagggcagaacgcagcgacgtcatgggaagtccttttcgtgacgagggttcagtgggagcaagcgtagttgacgacaggcccagcgcaatgctggccatactcttcgccagagtgccagcacccgcggccacagtgcgcggacccaatacgccgccaatatcagcaccacaaccaccgccatccaggccaacagatgccgtgacaatggccaccgattatgttgccccagggccttgagatcggcgctgatggagaaagccggcgtataggtactggcggcttgcgcctccaccgtaagtgccggtacttgggtggtttgcaggcgatggttgcggctgtcccaccatttcacgtggatggccggcagggtgtaacgcccgccctgttcgacgcgatacaccaggcggtcgatgcgttggccaccggtgatatggccacggccgtcgtccaggtcgctgatggcgggcacttgcagatacagacgcaagccgttgatgacacccgtgttggggggcggcagcgaaaggcccggggtgtcgtcggcttgcaatgtcagggtgcgtgtaaggctgtcacccactttcaggtccgtggccaccagggtttggctcaaccgcagcccgctggccaccacgaccggctcgccgggggcaaaccccacaggctgggtcgcctggaatgacaacggtgcggttgcggcactcagaggcgcactggcctggcccggctgggcgctgacggtcaaggcaggcaccgtgaagcgttgcgccgcaacgggcgtgatgcggtaggcgtagcgcattccgtagaaggttttgccgtcgatcaattgcgtggtgtgctcggcctcgccactgggcgcttgaacacgagcaccggacaatttcagcgtgggcagtgttgcactaccggtaaaccaggtgtcggtcagcacatccacctggacctgcagttgttcgcccaccatcaccgaggcaccgggttgcaactgcgcctgcaccttgagctgaggttcggctgcccacaacggcccggccagaaacagccacgcggcgcaataacggttcatcgctgcgcctcctggtcctgcaggctgaatttgcgtttcaggaagtttgccggcgatgtcgtgaggttctgcaaccacagggcgtcactgctggcctgccgggtctggatcgccttgctctggcccttgcctggcgccttgtcgaacttgatctcgtcaggcttgacctcgggcgtgttgttcgcggcgctttcggtgtctttcttcaaggcaatggccagggccaggttggcgctggcttcggggaagaccggttgcaattgcagcgcgcgctggtagtcggtgatggcgtcgtcgaagttgaattggcgaacatggatgttgcccagatagaaagccgcttgcgccgtattgagcggcgtgaaggtcgtctcggccaaggcgtagtcggcggcgctataggcggcgatccctttccagtaagggtccacaaactgcgcggccgcttctgggtagtgatgatgctcgaaagcccagcggcctctctggtcgggcgtcataaaagggttggcttcggcctgcaccggttgcagcaacacgccgagcagcagcacggccatccagttcaggctccagccacgtctgacgctgagcagtgcgattaacagcaacggccagcacagccagtaaccggcgtctttccactgcaacaggcgctgttgttcgtcggcgttctggaagtgttgtttggcgtggagttcgatccagtccaggtcgtcctcattgagcgtcaggctgcccagcggggcgtctgtcgctgaggccagttccttgagcgtggggctgctgccgagtgccagcaccagcacttgcaaagggctgtttgccaggtgttgtttgagggcgggcaattgcgcgacatccgcgccgtcggtgaccagcagcaaggtgccgggcgtgccctccagaaggcgtttggcctggtcgatcacacccgcgacgtccttgcccggtttgctgatcaagtcggtccccagcgcctgaataaaggtgtcgagcaaggccggatcatcggtcggcggcaacaccaggtgggcactgccggcgtacaccagcagggcggtgcgtgcgccttggcgacgctggatcagatcatgcagtttttgcttggcggcggtcaggcgggtgggcggtacgtcggcggtgtccatggagggcgacaggtccacagcgatgatcagtggcgcgcggttctccagaaaatccgggcggtcctgctcccaggtcggcccggcggccgccaccgcgccgatcaccagcaaggcgctggccagatgcaccgggcgcaggcggtgcgggtcgataggtgtgagcagcaaatacggcaacagatgcggggcgatgttgccgcgcaaccggcgttgcagctcacggttgcggcgccaggccattggcagcagcgcaccgaagagtgtgagcagtagccacgcggggcgcaggaagtggaaatcattgaagtccatcagccggctcccgtttgaatcggtggggccacagcgctgcgatcaagtgatacagcgccagcgtcgtcaacgcagctatcagcggccaccagaacaggtcacgcttgggctgatggctgagggttttcacctggtgcggggtgatggtgtcgagggtggtgtagacctggcccaggctgtcacggtcttcggcgcggaaatagcggcctccggtcgcggtggcgatgtcctgcaaggcgctgaggttgaccttggcttcgccggttgcctgtgggtcgccgatgccgatggtatgaatgaccacgcccttggcggcggccatctcggcggcgtggtccggggagatcgcactgctggtgtcgttgccgtcggtgagcaggatcagcactttctcgggttcgtgggcctgatcgagcagtttgagccccaggccgatggcatcgccaatggcggtattcggcccggccatgccgatgccactgtcgtccagcagcagcgagaggctgctgtggtcgagggtcaagggtgcctgggggtaggcgccgctgccgaacaggatcaggccgatgcggtcgtccttgcggcgttggataaagtcatggaccacctgtttgacggccgcgaggcggtcgatcttctggccgttggcgtcggtgaagtccggggtttccatggactgggaaatatcaatggcgagcatcaggtcgcgcaccggctgctgacgctcgataggtttttctacccataccgggcgggcgatggccattaccagcagcgcccagaccagcaggttgagcagccgttggctgcggttgtcacgcacgccattgacagcgggtgacgcaccaaccgcctggctcatgccgccgaaaaacggcacgcgcacggcgctgcgggcttccctgtaaggcggcaggtaccggtaagccagccacggcagcggtagcaacaccagcagccaggggtattcaagctgccacatggtggctctccacccaggttttgcactgggcccgtaattgcgcacagtgcgcggcaggaatcggcgcgccatacgcgagttgcgccagccgttggctcaggtcttcgggtacgggggcaccggcatgcttttgcagaaaggcttgccactcggcgccgctgagggtcggcacgcgttggcgttcctcttgcgccagtggcatcgacagcgcgacacgtttgagcagcgccggcagttcgcgcatgtcttccagcgcgttcaactgcgccaaggcttcgcgccgatatgcatcgcgccgccaacgcagccatttgcgcgcggccactatcaacaggcctaacaccactgcaccgagcaacaccccccacccccacgtctgcggccaatagctgacgggcgcaggcaaacccaactcctgcagttgttcgatgctcggcacctgcgtgctcaccggcgtctgcctaacgcgttgcgtagttggtcggcagcgggcagggcggtactgatcatcatcagcggcacctggctgcgctgcaacaagcgggcgacgtccttgaggcggccgccgagaaagtcccccagtggctggcgcacctggcgtttgcctaccaccagatcggcttgcaactggccctgggtgacccgtaaccggccgctgccgggcacgttgagtgccagggggtcatacacttgcagcgcgatcacatcgttgtgcgccgacaattgctgcaacagttgcaccgtgcgcgggcctgcaccggcaaagtcactgatcaggcagatcaaatgatcgtgacccgcgagggccacacactgctgcaacactgtgtccaactgactgtcgccttcgtggtccggctgggtcgcgttcaattcagcgttttgccgggcgatgcggctgcacaaggcctcgacgcgcttgcggctgcgcaacggcgccacacgctcgattcgctggtcgttgaacaccaggccgccgacccggtcgccggcgttgaataccatccacgcagccagcgcgcccagctcggcggcgatggctgacttgaagctgcgtaccgaaccaaaaaacatcgacatgcgctggtccaccacgatcagcgccggccggtcgcgctcctcagtgaaggtgcgcaccaccggcttaccggtgcgtaaagacgcgcgccaatccagatggcgcaagtcatcgccgggctgataacggcgcagctcgtcgaaattcagcccgcgcccgcgcagccgcgaagcatggttgccggcgaggaggctgccctgcggttggcgcgcgacaaaactcaagtcgcgggcctgaaactgcaaggccatcaattgcgccaggctgacgtagacgaaaccgtcggcgttcatgcgggaagcgccacgttgctcagcaggcggtcgagcacttgatcggcggtgacaccgtccgccacggcgtcataactgagttgcagccggtggcgcagcaccgggtgggcaacggcgcgcacgttgtcgggggtgacaaaggtttggccctgcaaccacgcgtccgcccgcgcgcaacggtccaggccgatgccgccacgcgggctggcgccgaggctgatccagcgcgcaaggtcagggtcgtaatcggcggggtggcgggtggcgttgatcaggtcgatcaggtagcggtcgatggcgggcgagacttgaatcgcgctgacttccttgcgcgcggcgaagatcacgtcctgcgccaggctaaaaccctgcacggcctggcaggtggcggcgtgttcctcttcacgcaacaggcgcaacacctggctttcattctcggcgctggggtagtccagcagcagtttcatcacaaaccggtccatctgcgcttcgggcagtgggtaggtgccttcctgttcgatagggttttgcgtggcgaccacgacaaacagttcgggcagcgcatggctggcgccagcaaccgtgatttgccgttcttccatggcctccagcaaggcggcctggaccttggccggtgcgcggttgatttcatcggcgaggatcaaattgccgaacaggggccccggctggaagcggatctggttctggccgtcgacctgatgcagcacttcggcgccggtgatgtccgagggcaacaggtccggggtgaactggatgcggctcatcttcgcatcgagatgccgggccagcgccttgaccgtgcgggtcttggccaaccccggcaggctttcgagcaacaggtggccgttggccaaaaggcccaggagaatctggcggatcacctgatcctggcccagaacactttcggccatgctggcttgcaaagctttcaaatcgttgagcgcggtcatgtcgatcgtccttgagtcagtgagcgcggcggccacccagtgccggcaggttggcttcgggcaccgcgcaaccggcaaacaaaccggcagcgcaaagcccttgcaatcgagcaggtgaaatcatggcgtcatccatccttgtatcggcctgatatcagggggttacatgcccggtctaaccctgttgcgaccgggcatgtggtgtcatttcagcggggtcaacggcggcaacttccattggccattacccacctcaggcttgggcaggtaaatacgcagcacggcataaaacggaccgggcggtgccggcagccagttgctttgttcggctttcggcggctcgtggtgctgcaacgccagggtcaggccgccgtcggcgtccagcttgaggttgggcagcattcgcgaattgatcaggtagcgttttttcaggttgggcgccaacagcttggtcttggcgtcatacatggtcagcgaccagaacgcttcggcaggcggcagctggtctttggcaaagtgcacggtgtagctgtgacgtgcgccgttggcaggtttaccttcgctgtcgacaaaataggtcaggtaaatggcttcgtcggtggagttgccgaaaatccccaggtcggcgccggcgtagcggtacaggtagttgtttttcaggcggtcacggctgccgaacagctcgccgctggacacttggtgggtgtcgatcttgtttttcttgaaggcggcaaactcggcccgggcgtcggcgatgccgtcttccagggccttgcgttgctcggcggtcagctctttgactttgaacggcgcgccgggggcgatgccgattttggcaaagcgtgcgagcacgtccttttcactgtcctggggcgcggcgaagctcagcatgaagttcaggtagcggaacagctgcgggccttcggtcatggtggccatgggcttgggccactcgatcttcggcaccttggccggcgccggttgtttcacgtagctgctcaacgactgcactttgtagccgctctggatctgtttgactttgcccaggtctttctcatcaaataactgcgtgcggtacagggcgtaggcaatgttgctttcgctgtagatcacacggtcgatgtccacgggctgctgacctttccagtcagggccggcgatcatgtagtggccaccattgttgccggtgctgcgggtgcccaggtaggcaatattttgcgtgtagaggtcgatcaactgcactgagtagtaacggttgtcttcgatcttcggcagcgtcagcaccagcggttctttgcgcaggtccatccacacgaacgagtagggtgtgtccgagttgggggtgacgaaagcggtgtccttgggggtaaatacttgcgcggtgttgccgatgtggttgaacggtgccttgaagttggcaccgcctttatcaacggcctgggtgtagagcgtcttgtacatcgctaccaccgggtagccatacaggtaggcttccttggcaatggcccgggcttcggcgggggtggctgtgaagtcggcccaggcgccggtgctcatgagtatcgagaggctcgccaacagcaggcgcgtcggttttccaatcatgttgttgcgtccttcctgagttcgtttaaacgggcgtggggatcaaaacgccgagtttcctgttttatttgccgaacgtcacgttaatccctgcaaacaacgtgaactgaggcaagccatcgcccttgcgcgccaccgtccactgcggttcgacatacgcattgaggatgttgctgccggctttccacgccttgcccgcacccaggccgatgggaatgtagtgggtgtcgttcttcaaatcgaaggtccaggtaccggtggagcgcaggtaccagcctttgggcaggttatgaatgataaacggctggagcgtggcgctttctacgtgggcacggtcgcggtcgccggcaaacgagctttggtattgcaccagcgcaccgagcaagccgcgtggcgaggcgtcgatggcgatcgcggccagcccggcctgccatttgccggtccccagttcgtcctgttcggcagtgggcgcggtgatttgtgggccgatgcccagttgtacgccttcagtcttgagcaggaagatgtcgaacaggttcaggtcaccgataccggtgctgtagccgctgtggggatccgggcgcgtgctgaggggcagggtggcgcgcaacaattgcggcacaccgataaagtctgaaggcgcgatgggcaacgtgcctcgcaacagcaggtcattggtatgggcgttggtgtcgtaaagccttggcgtgtaatagtcttgcaggttggcacccggcgcaaggttgagcgggttgttgcttttgtttgcggtgtcggcgttatccgccctggcacaaactgcgggcaatacaacaacggccagcacaagtgccggggtgaacaatgacctggacattgaagtgctccaattccctggaaaccgcccgttcgaacaactgtcgggctgtcctttttcacaaaattgtgtaggacatgtcgtttgaagctagcagttaaatcgagactcgctagctcagcgaaggaattagtcggttcgtgcaagcaccgtcacggtttttcaggcgggcgggagcatcgatttgaccttgtcgcgcagttggtcgatggagaagggcttaccgataacctgcatgcctgccggcacgtcgatattttcggcatagccgctggcaaacagaataggcagggcggggcgcagctcacgcactttggccgccagttgcttgccgtccatgtcgggcaggccgacgtcggtcatcatcaggtcgatggtctggctggcgttttggacaatcttcaaggcctcttcagcgtccgccgcttccagcaccgtaaactccagctcttcgagcacatcgacgatcagcatacgcacgatggcatcgtcttcgactacgaggagggtggaggcaggggaaggcatagagaatattcctgaaaaatagaagcgcaaggcttgatgggcgcacatgcaactcaataatgagtcatgacaacgccagcaagttccgaacaattgctggcattgtgaccgtagcgcacaagaatgtcgcggcgcttaactcacgaggtctgtgccgaggcgcaataccgcggcgtttaccgatcaggtgaggtcgtcatactctgacaagtcgatgtcatttttttcggccgattccttggaaagggtgatctttcccgccgtatagccggggcgaagtggtttgggcgccatcatctttccctcggcgtcaaaccggatggggttgtagtctggatgatgcgtgtagatacctcgattgtccgtagtcagcccggtgagtttgaatttgtcgatggttttcttggtcccgatgacgttgttctgaatgaactcttgttgtttgacgcctccatttttgaacatcatcgcggcaacgtcctcggcttcagtactggtgtgcatcttgcccaggaagccttccgtgggctttttggtcagtttggccaactgcgcggcaaatgagcgctccccgccgcttccagaattgcacatggtgaggcgaatctctttgtattgattcaggtcaatgtttgaagctttcaatttatccaacaactcgctcggtgtgatgaagtgtttattgacctccatcagggccgacgtgcctccgggagccatagcaccatgggcatccagtgtcaggcgcaggccgcgttttgtggtgtcttcggacatgcccagcccagtatccaacagtttgaacttttgcatttcaccacccatggctatgcttttggcattgaacatgggaagcggcgggccataagcacgaccggtcacggggttgtaggcataccatttgccattgtccagcacggcaccggcttcaaaaaactcatcgcccactttgtaagagcctgtcgctaccacaccattgttcttactggcggccttgagcaggtcatagttgccagtggcgcctctgagcgtattgacagcgtacttgccgttttcgatcaacgctgcggcacccttgctcaacagcctgccgcctccagctgccagatcgcccacgccactcagcgggttgagctctttgagagtcgtgacgccgatgactctcgcaactttaagccccttggcggtagctgaaagggccgacttgccgattttcatcagtttgccggcagcccccgcgccagccgtgaggaaactgaaggcatccagaataaggtcactcagaccctccccaagattgccctgtataaagttggaaatggctgagcggaagggaatcaagtccagcaatatgtttttggcgatctcaccgcggtttcttatcgtgtcttccggggtttctccgcgtgctatttcttttaaagcgtcctcgttaaattgtaggtgctccacaaacgcacggctgatcttggcggtgcgcgaaacatcgaaactgttgggtattttatccccggccgggcgctctttggttatatcgtcattgtccacattcattgtttttggcttgaattcctccgtaactttaatgttgccaatataacgcttgctcggccagctctgtttcttgatggttctgttcgggggaacttgtttaatcgtgttttcattgaagtttatttcgtaggcatacgtttttccttcgcgttcaaccttcaataaaagttgaggctcggcctcgattggcgcgaggaaccccttttggccaacccgtcgcgtcccttcctggatgaactcaattttcccgaattgcaggtttttccgatcttccaacggcagttgagagatcatgtgccgaataaccgtttttgtagcctcctcttttttccggataacgtttaacgccaactgatcaaagttgtccgggatgccgaagcgcccaggggtgttgagcttttctactggaaaggtggggtctatcgatttgaggcggcgcctatcggcccagtccatcatgacgatatccaccggtgtattcatagcaaagacaacgccgcgctcatattttccgcgcggggcttcagacgtgagaatgggcttttcaaagagcgcttcaaagtcttcaggtggtgttttcaacttggcgttggcgatttcctctttgaaccgctccctcaaaatctccagggccatctgttttcgcgacggtatttccgcctccagcgcggcggacgcgtcaagccgtttgttctgctgagtgttgaatgttcggatcactgtattgatttgtgcaggggtgtagttgttaccgggggctttagtgaggatgccgttggcaatagcccagtccacaagagcgttgttttttgctttctccacctctggagaggaagcctccgcgttttggggataggccatgacttgcgcgaaggtcatgttagccgtcgcccccggccgttgggcttcaatggccgccgtggcgattgtcaggttcgcccaggcctgggtgctggttttcacaccgtcgggaatgtctttgaccagaaactgcggcgccgtgcgggccagaagcaggcgggtggccaatttagcggtgtcggctgtcgcacgccctttgccgatcagatgctggctcaaaaagtctataacggttgacggccctcgcccccaaagtgcaggttgggctatgtcaaaccccgctattttattgtgcccgggcgtcctgatggactcggggtcaagcccaagatgaatcgccgtcagcagatagtcgtaaatgccggtgtctgtgggcacaccctccattcggtcttgaagcgcctggcccaacgctattgctttgggcgagtcgagtaatttttgcaacgctttaacagggtctttcaggtcgtcctggtccaccgaactgccgctcatcaagtaagcaagcgtgcccttgccgtcgacgggcaacggcaagcctggcagagggttttccttttcaacgtaaaggaagctgaacagttttgtctgatcctgttgcgacatcggtatcggccaggacaacccaccgccgaaattccccagcggatgcacgccggcctgttgctccagtgtatttgccagcgcagtgacttcatcggcagtgcgtggcagttcaaaacccaattccgtgacggcgattgccattgacggagaggtatttcgcgtttgcgtgaaggaggagccggtaaatggcaccaaaatgttctcgttcaaattattcaagatctgagctgggggaagcggcttgccatcaacccgagtattgatctctcgaagcctgtcggccaggtcgtaaagatcttgctggtctgccagaagtcgttgcagagtgctggtgggtggggcctggtcagtcatagcgtttgttattgaaacgcctgaggggttctgtgttggagttttctgcacgatgctactgtcttcttgaacaacgggtcgtatttgttgtggtgcatttgttctaatcatttggattaccttggcggatgaaaaagtgccgtctaaaggatcttccgtgttcttgagacgctgctctgagtaaggaaaccctgtagtgtggttcccggtttgctatggtgttgtggattgataagtgaaaaatggatcgttaaagaccgcaggctgacctctaggtaaacagtcgattacggaacagtagagggggttggaaatacataaacgacagtgcccactcaggcaggcactgcgctcattgagcaatcaagtcagatcgtcatagtcgtcgaagtccactttggcgtctgcgatttcgttgtggttaatatcgactttatctgccgtataggattgccgaagtgattttgcctccaacagtcggccctcagcgtcgaagcgaaccgggttgtagtccgggtggtgcgtatacacacctctgtgttccgaatccacgccggtgagtttgaatttatcgatggttttcttttggccattcacggtctcatcaataaactcgcgttgcttggcgccaccatttttgaacatccgcgccgcgacatcctcgacctcggtactggtatacatcacccccttgaagccttcagtgggtttatgagtgagttttgccagtgttgcagcaaacgattgttccgcgcccgttccggagttgcacatggtcaatcgaatatcactgtatttcctcaggtcaacaccggatgttttcagttggtctaccagttcatacgccgatatgtgatgcccatccacggtcatcaacgctgaggggctcccctcgggaatcactccgtgggcatccagtgtcagtcgcagaccacgcttggtcgcgtcttcggacatgccgaggccattgttgagaatcctgaagttttgcatctcacctcccatggcgacgcttttggcagaaaacaggggcaatggagggccataagggcgggcggtgacagggtcataggcataccacttaccctcgtgcagcatggcaccggcttcgaaagcgttatcgcccactttgtaggtgcccgttgccagaaccccatattctttgctggcggccttgagcaggttgtaacttccgtcagcgcctttgagtttattgaccgcctcaatccctttgtccagcaggtagcgggtgccttttcgcaaaagatccgcaccgccggttgccaggctgttcagaccactcaaagggttgagctcgccaagggccgcagcgccgataatttttgttgcttttaacgcctttgtgccgcgggaaagagcggagctgcctatcttgagcaacttccctgccgttgcagcaccggcggttagaaagccaaacacatccagtgtgagatcaaataaaccgtcgccgatattgccgctcttgaagttggcaatagctgacctgaagggaatcaggttgagcaagaagtcacccagtggtttgggaccaccttccagttcgtccagagtggtttgcccacgcgcttgttgttttatcgccggatcgtcgaggttgagatgctcgacgaatgcgcgacctatcttcagagagcgggcactgctgaagttatccaatagctccccattcggtgtgcgttctaccgccaaatcggcgttgtcatcgcccggcttcccgggggtgaatgctttggtttgataaatccagcggccttgagttgagttcttgacttttgcattgttcaaatgggtgtgttcgatgctgcctttgttgaaatctattttgtacgcacaggatttgccctcgcgctcaacgttcaccaacagctcgggtttgttggggtgttgcgtccccccccacagcccaacgccttgctcgtaagtactttcctgaaaaaagctgatttttccatattcaaagttttttcgatcctccagcgggagctgagagatcaaatgtctgatatttgtgttgatggccgcctttttgttctcgatggccgtttcaaattgttggtcgaaagcctctcgaacgccgaatttcaagttgttattcagcgtcgccaagggaatacgcgggtcatccgatttgaaggggcgcacatccggccagtccatcatggcgacgtccagcaacgaatgttttcctgccagccctgtttgcgtgtgcgttcccaaataggggtcggtgctcaatacttttgcttcgaacagtgcccccaggtcaccaaaccgttcttttagaacggccaacgcgatctctttgcgcgtggggatttctttgtccagcgaccgggaggcggtttgcaaaagatctgcacgctgggtgaacgcagttcgcaattgattgatttggacggaggtgtacctatcctcactgttgtattgcaacttgccgttggccacgccccaatccacgattgcatcgtttaccgcgaattgaggggcaggggatgatgtcgtgaccctcgacgaataactcatcacgtcggcaaaggtcatgttcgcgacggcccccggctggtcggcttcgattgccgcggcggcaatcgtgaggtttacccacgccacgctaccgatcgtcaccctgtcaggaatgtctttgatcaggtactggggggccttgcttgctaacagaagataggcggcgaggggggcagtgtcgtctgtcgcccggtatttcccgacaaggtgccttttgagaccttcgacaaccgacgagggcgacttgccccaattgtcagggtgtgccagttcaaaatcggtgatgaagttgcgcttaggtcttacggtagactcccgatcaattcccgtctgcaaggctgtcaaggtgtagtcgtaaatactggtgagtgatgagatgccgtgcaaatgcgtttgcagcgcttttcccaatgcctgagccttgggggtgtcgagcagtttgtgcactgcattcaacggatcttgcaggtcgtcttttgtgactgagctaccgctgagcagatagtccagcaccgttttggtcaaatccgtcagaggcaggccgggcagtgggatgtcttgaagccgcacgaacaaaccgcttgtgtgttgatcctcttgcgacatcggaatcggccaggaaagcgcgccacccaaattgcccagaggttgcacagaggctcgttgctcgattgtttgcctcaacttatcgagttgatcgggggtgcgcggcacttcaaaaccaagatcagtgatggcggttgccagggacgtgggcgtcgctcgcttttgcgcgatcgaggagccgataaaaggcaccaaaataccctcgttcaaacggtaggcaatttgcgccgggttcagcggtctgccataagaccgggtatcaacgcctcgaagcttaccggccaagtcgtataaatcttgctggtctgccagcagtcgctgcagcgtactggtggcgaggggctgttcaagggcggttacttgtgccaaagagtttgaaccgccttgcgtgggagattgggtatccgggctagtggtgtcttgagcggtgatcgacaggttctgtgctgtgtttgtacgaatcatttggcttaccttgacgtggcagaaaagcacctcccaaaagatcttccgtgttcctgaagtgcagtcctgagtgtggaaccgctgaagttccgttccgccctcgctgtaggaagttgtttggagttatgtaaacaaagagattcatcccacatgaccaagtgagtgattcgcgcgtagcacacaggtttttgcacctgaaaaaacgcagaaacatagccctggcccctgacattcgggcaaactccccctttttccgcacttggccaaggcacgcccatgactcccgcttcgtctgtcgatgaaaagagctttcgtaaactcctgagccgtaacgtggcgttgccattgggtgtgggtgtgctcagtgcggtgtttttcgtcgttctgatcacctacttgctgtcggtgattcagtgggtggagcacaccgatcgggtcatcaacaacctgaatgagtcgtccaagctgacggtcgatctggaaaccggcatgcggggtttcctgattacgggcgatgaacatttcctcgacccctatgaagtggccaagccgcggatcgttgcggatctgcgcaatttgcaggagttggtagcagacaaccctcagcaggttgatcgcctcaagcgcctggaagcgctgcagatcgagtggaacaaatacgctcaggcaatgattgatatgcagcgcgacagtggcgactaccgcagcgcagtcaaggctggccgtggcaagcgcctgaccgacgagattcgcaaggaatatgacgacgcggttgcgatggagcagcagttccgcatcacacgcaacgaagaagtgacccgcaccaccgtattgagtgtcacgctgtatctggctttcgtgctgggtttgagtggttttctggcctatgtgggcaggaaaaatcttctcgcgctttcagagagttacagcgacaacctcgcgtcacaacagaagatcgcccgccgcctggagcaacaggcctggctgcgtaatggccagacagagctggccgagcaggtgcttgggcaactcaccttgaacatgctcgggcgtaacatcctgcagttcttcgcccaatacatgggctcggccgttgccgcgctgtatgtgcgtgaagagcacggcggcctcaagcgcgtggccacctatggcttctcccgcgagcaggaacaacaggagcagtcgatctacagcgacgaaggcatcgtcgggcaggccgcccagcttgatcgcctgatccgtttggacgacgtgccggttgactacttcaaagtcagctctggcctgggcgagggttcaactcgcagcgtgttggtgatgccaaccagtgatgacgaccgcgtcaacggcgtgatcgagctgggctttctgcgcccgctggatgagcgcgacgttgagctgctggagctgatcgccggcaatatcggcacctccatcgaagccgctcgctaccgccagcgcctgcaggaagtgctggccgaaacccaacagctcaacgaagagctgcaagtgcagcaggaagaactcaagaccgccaacgaagagctggaggagcaatcacgcatcctcaaggagtcccaggcccacctggaaacccagcaggcggagcttgagcaaaccaacgagcaattggccgaacagacccagaccctggctgagcaacgcgacgccatggaccgcaagaacgtcgaactcaaccaggcccagctggagcttgaagatcgcgccgacgaattgcagcgctccagcaaatacaagtccgaattcctcgccaacatgtcccacgagctgcgcacgccgctgaacagctcgctgatcctggccaagttgctggccgagaaccctcaggaaaaccttagcgccgagcaggtcaagtttgccgagtcgatctattcggccggcaatgacttgctcaacctgatcaacgacattctggatatttccaaagtcgaggccggcaagctggaaatgcgcccggagaactccagcgtggcgcgtttggtagacggcctgcgcgggatgtttgagccgctcgcggcggatcgcaagctgggcttccaggttgaagtgcacaaagatgcgccggcgatgctgtttaccgaccgccagcgcctggagcagatcctcaaaaacctgttgtccaatgcgatcaagttcaccgagcagggtgaagtcagcctgtcggtcgcccgggcggcaggggagggtattgccttcaccgtgcgcgactctggcatcggcattgcgcccgaccagcaggaaagcattttcgaagcgttccgccaggccgatggcaccactaaccgccgttacggcggcaccggcctgggcctgtcgatttcccgcgacctggccaccttgctcggtggctatatcagcgtgaccagtgagcccggcaagggcagcactttcaccctggtactgccggagcactatgtggagcgcgatgaagacgctgcccccattgaacaaccgtgtcaggtcgtggctgccccggcacccaaaccggtcgcgatttcgcccctgccggtcgtcgacgccaagcagatcccgcgctttgccgatgaccgtgacaaggcgccgttcaccaaccgctgcattctggtggtggaagacgagccgaactttgcgcgcatcctgttcgacctggcccacgagttgggttaccactgcctggtcgcccacggtgccgacgagggctacagcctggccgaagagttcattcctgacgcgatcctgctggacatgcgcctgccggaccattccgggctgacggtgctgcagcgcctcaaggagcacgcaaacacccgtcacatccccgtgcatgtgatttccgtggaagaccgcgtcgaggccgccatgcacatgggcgcgatcgggtacgcggtcaaacccaccacccgcgaagaactcaaggatgtgtttgcgcgcctggaagccaagctgacccagaaggtcaaacgcgtgttgctggtggaagacgatgacctgcaacgcgacagcattgcccgccttattggcgacgatgacatcgaaattaccgacgtcggctacgcccaggcggcgctggacctgctgcgcaccaacgtctatgactgcatgatcatcgacctcaagctgccggacatgctcggcaacgaactgctcaagcgcatggccaccgaggatatctgttcgttcccgccggtcatcgtttacaccgggcgcaacctgacccgcgacgaagaggccgagctgcgcaagtattcgcgctcgatcatcatcaagggcgcgcgctcgcctgaacgcctgctggatgaagtcacactctttctgcacaaagtcgaatcccagctgtcccatgatcgccagaagatgctcaagactgcgcgcagccgcgacaaggtcttcgaggggcgcaaaatcctgctggtggatgacgatgtgcgcaacattttcgccttgaccagcgccctggagcacaaaggcgccgtggtggtgatcgggcgtaacggccgtgaagccatcgataaactcaatgaagtcgacgatatcgatctggtgctgatggacgtgatgatgccggaaatggacggatatgaggccaccgccttgattcgtcaggacccgcgctggaagaagctgccgattattgcggtgacggccaaggccatgaaggacgatcaagagcgctgccttgcggccggctccaatgattacctggccaagccgattgacctggatcgcctgttttcactgattcgcgtttggctgccgaagatggaacgcatttaagtggagcgcagttttttggacaaaagcagcgatattgagctgcgcctgttgatcgaggcgatttacctcaagtacagctatgactttcgcgattattccggcgcgtcggtgaagcgccgcgtggcgcatgccttgcgtcagttcgattgtgcaaccatttccgcgttgcaggagcgggtattgcacgatccggcggcgttcatgcagttgctgcagttcctgacgattccggtcagcgagatgtttcgcgacccctcgcactttctggccatccgccaggaagtggtgccgttactcaagacctacccgtcgatcaagatctggatcgccgggtgcagtacgggggaggaggtgtactccatggccatcctgctgcgcgaggagggcttgctggagcgcacgatcatttacgccaccgacatcaacccggcgtctctggataaagccaaacagggcattttctcgctggagaacgtgcgtgcctacaccgccaattatcagcaagccggcggccagcgttcatttgccgactactacacggcggcatacgattacgcaatcttcgacaaaacactgcgcgagaatgtgacctttgccgatcacagccttgcgaccgacagtgtattttcagaaactcaattaatttcatgccgtaacgtactgatttatttcaataaaaagttgcaagatcgagcgttcggattgtttcatgagtcgctgtgccatcgcggcttcctggtgctgggcagtaaggaaaccctggatttttccgcctacagcaagcaattcgagcctctggtcaagcaagaacggatctaccgcaaatcatgaacgaccagcacgccaacccggttcgcgggattgaagccatcgtcgtcggcgcgtccgccggcggtgtcgaggcgttgctgagtatttttggcgaactgcccgaggggttcggcttgccgatcattgccgtgctgcatttacctgatgagcgtcgcagccaactggcggaagtctttgcacgccgcctgcgcataccggtgaaggaagcacgggacaaggaagtgatcgaggcgggcaccctgtatttcgccgggccgggctatcacttgtcggtggagcttgaccgcagcctgtcgttgagccaggaagatcgcgtgcaccattcccggcccgctatcgactacctctttgcctccgccgccgatgcctatggtgcaggcctgctggcgatcctattgaccggcgccaatcaggacggcgcccatgggctggcccacgtcaagcattcgggcggcaccaccgtggtacaggaccccagggaagcgcggattgccgtgatgccgctggcggccctggccctgcacacacctgatcatattctcaccctgggccagatcggctcatggctggcttccctggaaaactcaccatgttaagtactgtccaggccaaactgctgatcgtcgacgatctgccggaaaacctgctggccctcgaagcgctgatcaaacgcgaggatcgccaggtcttcaaggcattgagtgccgacgaggcgttgtccctgttgttggaacatgagttcgccatggcgattctcgacgtgcagatgcccggcatgaacggtttcgaattggccgaattgatgcgcggcaccgaaaagaccaaaaatattccgattgtgtttgtcagcgctgcaggccgcgaactcaactatgccttcaagggctatgaaagcggggcggtcgacttcttgcacaagccgctggatatccatgcggttaagagcaaggtcaatgtgttcgtcgacctgtaccgccagagcaaggccatgaagcaacaggttgaagccctggagcgtagtcgccgcgagcaggagctgctgctgaaccgcctgcaggcgactcaggccgaactggagcaggccgtgcgcatgcgcgacgacttcatgtcgattgtcgcccacgaagtgcgtacgccgcttaacggtctgatcctggagacccaactgcgcaagatgcacctggcccgggataacgctgccgcctttaccctggacaagatgcacgccatggttgaccgcgatgagcgccagatccagagcctgatccgtttaattgaggacatgctcgatgtgtcgcgtattcgcaccggcaagttgtcgattcgcccggcgcattttgacctgacgcaactggtgcgtaatctggtggaaaactttgccccacaggtggcggcggcgggctcatccatgcagcttgtggccgaggcatcggtggagggcaactgggatgagttccggatcgaacaggtggtgacgaacctgctcaccaacgccctgcgttacggcgcgaaaagcccggtggacgttcgggtgtacaccgagcacggtgaagcgcgggtcgaggtgcgagaccgcggcattggcatcagcgaagagaaccagaagcgcattttccagcaattcgagcgagtttccgccagccaggttgcagcgggtctggggctggggttgtttatctccgagcaaatcgtggcagcccatggcggcaccatcgaggtcgagagccagataggcgagggcgccttgttccgggtgtgtctgccccttgaggtgccgatgtgaattcaatcgtcagctcgacgcaacctctgcgtgaccccatggtcgtaactgcagcaattgaccggacaaaggcttcccatgagtgaagatgcgcaagacgttgtactgatcgtcgaggacgacgaatcgattatgtttgtgctgggtgaatacctggctggcttgggctatcgggtcttgaaggcgattgacggggagcaggcctttgaaatccttgcaaccaaaccgcacctggacctgatggtcactgattaccgcttgccgggcgggatttccggggtgcagatcgccgagcctgcgatcaagctgcgcccggaactgaaagtgatctttatcagcggttacccgcaggaaattctcgactgcaacagcccgatcacgcgcaacgcgccgatcctggccaagccgttcgacctggatacgctgcaagagcatatccagcgcctgctggcttgatgtgaggcggcgtactctcagagcgccgcgtgtttcagccgatcacgttcagagtttctcgacattggctctcagcgtgcgggagggcgtataggcaaattgccaacccggcttggcgtcgagcccatcgaggaagttttgcagacctttgtgtttatcgttccccaggtggtagacactcatccctccactgatcacaggcgggttaccatttctgatcatggcgaggtcgagatcggggctattggtgttgaacagaaataattcgccgtcgttgcttttctggatatagacagtgtgagcaaaatcgccatcgggagtggcgtgtttgaaattaagcaacccggactcggtgatatcagccggattgaaggtggttttgagactgccaggctcgattcccatgtacgccaggtagcgaggggagtagttggtgcctcctttacgattagtcgccgccacgacggcgtcatatacatcggcggttaaatttttttccgcctgccctacacgcatcgaggcctcgtaacagatcaaaccttgattgcccggcgcctgatgcaaggtttcccagttacgcttcagttggtcatgagacaggctggaggatgcatgctcatccaatggcaattgataggtttttttaaacttcacttcgtcaatgctgttcaacgctttccattgatcgtcatgatcaaaaattttgaatgccaggcttttggcgtttgcgctgtgcgttctatagggcgtggggagatgcttgtcattaaataaccgggtcaatcccgcctccatggcttctgaagttttgaaataggcaacgccgacattagggtcgtagaaataaaactgcttgtctgtacccttcacaataacccctgccgccatcgcatggcctggcgagtcgatcatgatggatttagtgacgcctgaatcagacagttcctggaccatgccctggcaggagacctgccgggaaactttctgcgcataaaaggcagctttaccacccacctgggtctgaagactgcagattgactgcatgaattctctggaagcggccgtatcagcacgtgcggaagctttgtacaggttgttgataaaaacggtgtcttttccttcctctatggcggtggcaaacgtacgcgccagagcggcacactggccgtcggaaaactgcgccgttgaactaagatagctggcttgtggcatgggaaacaccacaccaaattccgggtcaatgttgtcgatgaacctggcggcgcctttgtgaccttgcttgaatgccaggttatcgtattgcctgacaagcgcgcccaccgagctggcagtgatatctttttttttcgccagtttcatcagctccagtgggttcattttcttgatgtttttgctgagcccttctggcaaggccgtaccgtaataagcggcttcaaattcagctttcttatctccaaatttatagcgcttgacgaccttgtcccaattttctttgatggcttttgtcttcggatcaagcacccgggtgccaacggcccagtcaccaaacgggttctgtatagacggaacaaagtcgctgagcgctgaaccaaagggttggcgcaagacgggatcataggcgtgccagaccccaccggtaagaaccgccgggccttgtataaggttgccttcatgcttgaacgttcccagggcggatgcgtcaaactttttagccgctgcgatcaagtcatagcttctgactgagccgggtagtttctcaatgagtgttttacctgcactacctatcttgtatatcccgcgcgcagtacctttgagtaaacctgtgatcagatcaacaataccgtccagcggattgagcaagctaatggccgctcgcccgacaattttggccagaaacagtgctttggaaccgacagccaaacctttcagtgcttttcctgcgatgctggcgcctgcggttacaaaaccaagaacatcaagggccagatcgcctatgccctctgcgaagttaccgttcgaaaaacttttgatggcggagtatagaggaacaaagttaagaaggaagttacgaaattttgcgtagcctggcacttccgtatcaaaggttgtagcacccttggagaacgctcttaatttttccgtgacgccagcatacacatggcgggtcaccaagtcggcaatggcactgatacgtccgctgttgtaagtatcatgaatgcccggtgtagagcccacgtcgagcttgccgagttcgtaggtgtattttcgtgtgtttggcagttgtgcatagtcgggtactgctatgtcgtcagtaccgtctcctgcaacaattgttttgctctggagatggccgaatacaaatttcttctccaggtctactcgccttgttacatgacctttctgtggattaagttcataaaacctgacgttcgagcccatttggctgcgtacgacgacaggtttgttgtcgaccggttgagctcggtaaaggtgattgctcccgggggtggggtcgtaaataagctcttcacaataaaaagtcagctgtccgttatttataaactcaaggtcttctgccggcaggcgcgatatcagatatttaacagctgtttttgtgctggattgcagattgtcaatgtgactttcaattttttcctggtacgccttggcgacctcgggaaacccagaggacttgccgaatatttcagcaaagtcgatagcgtaacgatgtgacaccgcccatttatttttgtacgtatgttgtactgtcgtccctcttgttaccgaaggcgggttgaacagacgattcgatatatgcaggtccaacagtgagtaagggccaggaaaatctttatggaggaggtcgagcacgataaaccgggtattgatgaaatcataaaaagctgctttatctccgtgctctttacggtattgctctgtgctggccccggggattccggctttgctcatgagcgtgttgaagtagggttgattctgaacctggttgaaaccgagcgcctcgtacagttgctctgctgcgacgttttttcggagggggagcggcgtgttgcccgtctcgacaacatgaaggagttccgtcatctgtttctgaaacgccgccaacaccgacttcatttcatccgcggtgtaatcgtccgaagggctgagggtaatcagtttgttggcgacgccccagtccatgagcgcattcctcttggcactccgttctacctgctgttgctcggtagtaagcagggcgatgtccccctgacgcaggatgtctatgtacctcatggtggcggtggcgcccggcgtttgtgcttcaatttttgcgacggcggtgctgaacgtcagccatgcctgcgagccatacgtcactgctgcgggaatatcatggaccaaaaactccggcgcacgttttgccaggagcaagtgagcagtgacgagggccaattcgtcagtggcatgcgaacggcctttaccatggcttgacgccacgagatggtctgccatccgctttaccacggccgaggcggtgagacccgagttacccggctgggcgagttcaaaaccggctaccttggttctgctgaagggttgagattcacggggttcaaacgcttcatggatggcggccagcacgtgatcactggcgcttgtggcagtcgcaacgccacgcaggctttcttgcaacgcgttacccaagccttgtgccttgggtgactcaagcatctgttcgatcgtttgtcgcggtttgcgtggcgtattgccgggctgtttaccgaacaagtaacccaccagaacgaaggggttcacttcgcctgtctggcgtgcggtaattctatagttccaatttatatctgaatctgacagtggaaccggccagtttgtggcaccgctaaaattcccgtacggccgggcctctggtgtgggggtttccagagcggtgactaaagcatccaactcttcaggtgtggtgggtaacgtccagtgtcgttcccttagatagtggccaacactaatccgctctggggtgcctgttgagtcggcgtcatcggaaacagcggttgaaggcaggctgaaggttgtattttccaaccgctcgcttagtgattgcgagccgtctttggcaagtactttcaagcgccagatcagtgcgtttctgtcattgatttcgtccactgcgcggttgtgcagcagcagttcagcatcagaacctgaatggccagggtcgaaattgctgaaggcggtgccatcctccaactcggctgcgctcgcccgaattcgatcttcaagcgtgctttgcggtgcctggtcaggtgtgttcttcccgtaaaactttgcgatgtcccgtgcatagacagtgttgcggtaatactggatatcagcagtttgcccgaacgctttagctgccttgataagaagaggaaaagccagaaagccggcattaggaaagtgcacggacttcccgttgacgacggctacgatgcagttatctttgggcgaaatcgtgatgccgtgcgacaggtcgatatcgttgtgcgctacccagtctttaaagctgccactgtctacaatccgagtggtcaaggcccgccacagtccatagttcgagtcttcggggatgtcgggaagccaagtaatgctctggtaataaggggcgacagggttttcgccatccgccgctttcaataacagctggcggtacacgtgggccagttgcttatccgcctcttgcctgggcgaggagggcctggccaacgctgactcttctgtcgaacgcgccggatcagaacgtttcacgcgttcattgtgaaccgccgcgttgcgggcctggtttcgaaggtttaacgggatggaaagcagcgaaggggggctcgatatcattatgcgtactctcgaaacatataagcgaaccgtctgcatcagacgtggaacacttattcagtggcgagaggttaagtttcgatccctgggttctgaggcggcatgttacttcaagttttaatgagtgctcagacagcggttcgtaacagtgaggtcgtgacccggtcatttgaattacgtccggatcatctcccgcacctttgccgtgagcagatcaaacgtaaacggcttggtgatcaactgcatccccgggtccaggaaaccaccccgcaccgccgcgtgttcggcgtagccggtaatgaacagtactttcaggccaggccgtatctgccggccaatttccgccagttgacggccattcatgccgggcaaccccacatcactgatcagcaaatcaatccgctgctccgattcaatgatcggcaccgccgtgttggcgtcgccggcttctacaaagccatagcccaactccttcaacaccgcactgaccaacaccctgacggctgggtcgtcctcgacgatcagcacggtttcccctgcattggcgaacggcaacaacgccgggttgacggcttcctcctcctgcatttcaccgataaagcgtggcaggaacagactgaccgtggtgcctttgccgacttcactgtggatcgttacatggccgtgagactggcgggcaaacccgtagatcatcgacagcccgagcccggtgccctggccaatcggtttggtggtgaagaagggatcgaatacccgccccatgacgctttccggaatcccgcagccgttatcactgacgctcagctcgacgtagtcgccgggttcaagggtgccgtaggcggcggtaaacacattgtcgagatggcggttagcggtttccaccactaaatgcccgccattgggcatcgcatcacgtgcgttgatgacgagattgagcagggcgctttccagttggttggggtcagcctcggccgtccacaattgctcttcaaggcgcatatccagtgaaatactttcgttgatgctgcgctgcaacagctcgcccatcgaactcaccagttggttgatttccacgggctttgagtcgagggactggcgacgggaaaaggcgagcaaacgatgcgtgaggcctgctgcgcggttggccgaagtgacacccaggtcaatcaggctgtcgaggtcgtccagcttgccgcgcgagacacgccttcgcagcagttccaggcttccaatgatgccggtgagcatgttgttgaagtcatgggcgataccgccggttaactggccgaccgcctccatcttttgggactggcgcagggcatcttcattgtggcgcagttgcgcggtgcgttcctcgacctgctgttcaagggtttcgagggtactctgcaggcgtaattcgctctggctcaggtcaaccagccggcttcgcgcctcatattggcggcgcctgccacgcagcgcggcgctgaccaggctgatcagcgtgatggggtggaagggccgttccagaaaggtcacgttacccagcagcccgctcaggtgaaaagagccactttgctctctgccgccgtgatgagtcatcagcacgatgggcaagtccgaccaggctggctgctgatgcaaatgctccagcagcggctccaggtccacgccgtgcaaggcttcggcggcaatgatcagcagaccggcgccatcctccagcgcttcgcacatggccgtcaggctatcggcgatgactccgctgtaaccggcctcattgagcatcatctgcgccagggtgctgtcgcgccccagcggtgccagaatgattgcccgttcggagacgggggcaaggtcagtcactagccctcatccttgagcagaggcgagccggcgcccatgtaagtcggaatgccgcgcaacacaccctggaaattgtccagaggctcgccgacggtcatgccgcgactgccgatgcggtattcgcgaatggtcgattcatgtgagccggttcttttcttgatgatcgagatggcccgacgcacttggccgagcgcttcgaagtaacgcaatagaatcacggtgtccgccaggtaggtgatatcgaccggcgcttgcatgtcaccgaccaggccgtgctgggcgacagtcatgaaggtcgcggcaccccggcggttgagatagagcagcagctcgtgcatgtgcagaatcagcgcgttttcttccggcatcgcggcctggtagccgttgatgctgtcgatgaccaccgtcttgatgccgccttcatccacggcgcggcgcacacggtgggagaactcgcccggggacaactcggcggcgtctacctgctcgataaacaggttgccggtagcccgtaaggcttccaggtcgatgcccatgtttttcatgcgctcgaacagcaaacccagctcttcgtcgaagatgaacagcgcggctttttctccgcgcatcaccgcggcggaggcgaaaatcatcgagatcagcgatttgccggtaccggcaggtccgagaatcaggctgctggagccggtttcgatgccgccgcccaacagcaggtccagttctttaatgccgctcgttaaggtctggcggtcgtatccgccgcgatgctcggccgccaccaagcgcgggaacacatgcacgccgtcttgcaaaatggtgaagtcatgaaagccgccacggtatttctgcccgcgatatttcaccacccgcacccggcggcgctcggcaccgtagttgggcgtcagctcttccagacgaatgaccccgtgggccacgctgtgcacggttttgtcgagggactcggtggtcaggtcgtcgagcagcaacaccgttgcgtcgtaacgcacgaagtaatgcttgattgcgaggatctgccggcgataccgcagggagctttgcgccagcaggcgaatctccgacaggctgtcgaccactacacgtgtcggcttgacgcgctcgaccacttcgaagatctgccgcgtggcttcacccagctcaaggtccgaggagtacagcaggctctgttgatgttcggcgttgagcaggctttccggcggggtgagttcgaagatatgaatattgtcgtccaggtcccagccatgggacttggcgccctggcgcaattcgcgctcggtctctgacagggtgatatacagcgatcgctcgccgtttttcgcgccggcctgcaagaagtgcagcgccacggtggtcttgccggtacccggttcaccctcgagcaggaacagatggctgcgcgatagcccaccggaaaggatgtcatcaagaccctcaatgccgatggctgccttttcactgaacagcgttttggatgtagacaaggtgtgccctcaggtcacgtacaagtagaggtgcgcacccggcttgggtgcgccatatttacttgaccgttacagcctgtggcggttcaacgttttgaaatatttgtacaaagcggtggtttttcgacaagttttaacgcgccattacagaccttgctgcagtgccggatcatccggattttgctgttcaagttgcgccagcagcacttggacgttctgtaactgaccgctttctttccagtaattgaccagcagcacgcgggctttgcggttggcagggtggcgctggatgatttcttccaactggcgctgggcggcttccaactcttcctgtgcatgcagtgtcgtggccaggtcgtagcggtaatcctgatcgtccggctccagctccaccgccctggacaagccgagcaaggcataaggccgctcgccatggtgcagcagccacatgcccagggcatgctgcaggtaggccgattccggatgcgccgccagctgacgcgcgagcaactgccgggattcttctgacttgccttgcttgtcgagcaactcgatttgcgcgaccaccgcttgcagattgtccggctgcaggcggattgcctgttccagtgcgttttgcgcgtccgccagcaaggcgctgtggatgtacaggcgcgccagttgaatccagttttgcgctgactcgggctgcgccttgatctttttgacgaactcatcgagcacttgctgcaaggggccgaaatacaggccaagggtatccggcgaaaggccgagcagcgcgttggctgcgctgaagcgaacttcctgctccgggtcgtcaagggcagggccgagcaacagtgtgcgttggcccgtgggcaccaggccgacaatgctgtggatcgccgcttcacgcaccaatggcgattcattggcgaggtctttatcggcgagtttcagcgcctgcgggcttgggtaattcggcagttcggcatgcagcgcggcgcgacgttcaggggacaggtccggacggcccagctgctgatacagcacgcgcgcagcgcccggttcaccgttatgggcctgtttaagggctttggcgtagccgtgggcaatggctggcggcacagccaccggggtggaacgggagaaaaaccaagtgaccgaaacaatcaacagcagggcgcacaagccggcgagggagtaacggcgtgactttgacatgcaggcgtccaaaagcttaggcagctatcgcaaagccatcagcttcggtcagaccaccgcgagtgtcaaacccgcatcaggtcagcacgtactccacgggctccagcaccggcggcaagtcggtttcgccaagggcagcgaggatttcacgttccagggtgcgcagcagcgcgttgcacggcaggtcgttttcgtcgaagccgaacgggtcttccaggtcgtcaccgatttcatccaggccaaagaaggtgtagctgacgatggcggtgaacaccggcgtcaaccaacccagcggctcggccatggcaaatggcaacaggatgcaaaacaggtaaatggtgcggtgcaataacagcgtgtaggggaagggcagcggcgtgtgcttgatccgctcgcaggaggcctgcacctggctgaggctgaccaggcgggtttccagctgggtgtagcgccactcgctgatcacgccgcgttcggccagtttggaaaactgcgtgccgacctgttgcagcaccgcgtcaggcaggttggggtgactgctgttcacgctcatccatggcgtgatggccagcgcttcgtcttcatggcgcaggcgcgcgatcaaaccatgggcgaaaccacacagcccgcgcaacaggccggcgcgctcgggtgagtcgccgagcacctgggtctcgcgaatcagcgaacgcacctcaatgatcatctgccccagctgcttgcggccctcccaccagcggtcgtaacaggcgttgttgcgaaagctcatgaagatcgacaacgacaagccgagcagggtgaagggcgtggcgttgaccttggagaagtaggccgggtgccaggtttccaccagcacgatcaccgaagccagcaacgtgaccagcaggctgcgcagggcaatgcgcttggcaatcgaacctttgagggaaaacaggatgcccagcaggttgggtttggggcgaacgatcatcgcgagggggcttcttctgtggcgcaggcctcaaggttagaagctgcggcgcagggcgtccaatcacttgggccgaccggttaatcggcgcagtcaatgattggccaaaccagtcagcgaggttgaaggctttgaccattgccgctgcgccgctctagagcgactatttccatggtttgcgtcctgaaaataaaaaacacagaaggatttgaaacgatgcgtgagtatttggctgccacgaccgggtttgattaccagcacactgttgatgccgctttggcgggagacctgcaggcgctcaacgcctgtgtggagtgctgcgaccgccatgcgctgccggggcgcatcgcgttgttctgggaaggcaaggacgggcgcagcgccacctcgacctttaccgaactgcaggaccaggccgcccgtttcgccaatttcctgctggcccagggcgtcaaacggggtgacaaagtcgccggcctgttgcctcgcaccgccgaactgctggtggtggtcttggctacctggcgcatcggcgcagtttaccagcctctgtttaccgccttcggccccaaggccattgaacatcgcttgaacagctccggcgcggcactggtggtcaccgacgcggtgaaccggcccaagctggccgacgtggaggcctgcccgacgatcgtcacggtggccggcgccaagggtgaaggcattgtgcgcggcgatttcagcttttgggccgagctgcccaaccagtcgaatgtgtgcgagccggtcatgctcggcgccaatgacccgtttttgctgatgttcacctctggcaccaccggcccgtccaaagcgctgtcggtaccgctcaaagccattgtcgcgttccagagttatacccgcgatgcagtggacctgcgccctgaagacgcgttctggaacgtcgccgaccccggctgggcctacggcatctatttcggcgtgacggggccgctctccatgggccatccgatcaccttctacgatggcccgtttaccctggaaagcacctgccggatcatcaacaaatacgggattaccaacctcaccggctcgccgaccgcgtaccgcctgctgattgccggcggcgagccgtttgcccagtcggtcaagggcaggctgcgcattgtcagcagtgccggcgagccgttgaacccggaagtgatccgctggtttgccgacaacctgggcgtgaccatccacgatcactacggccagaccgaactcggcatggtgctgtgcaaccaccacgggttggagcatccggtgcacgtgggctctgctgggttcgcctcgccgggccaccgcattgtggtactcgacgacaaccatcaggaactgcccgccggccagcccggcatcctcgccattgaccgcgagcaatcgcccatgtgctggtttgccggctatgacggcgtcaagaccaaggcctttgtcggcaagtactacctgagcggcgataccgtggagctgaaccccgacgggagcatcagttttgtcgggcgcagtgacgatgtcatcaccacgtccggctaccgtgtgggcccgttcgacgtggagagcgcgctggtcgagcacccggccgtggtcgaggctgccgtcgtcggcaagccgtgcccggagcgcaccgaactggtcaaggcgtttgtggtgatcaacgcgcaataccgcgccaccccggagctggccgaggaacttcgcctgcacgtgcgcaagcgcctggccgcgcatgcttacccacgggaaatcgaatttgtcagtgacttgcccaagaccccaagcggcaagctgcagcgttttattttgcgtaaccaggaaatcgccaaggcggcggtcgcctgatccacttttaaggacacaacgatgcagattgaaaacaaggtattcctggtcagcggcggtgcttcgggccttggcgcggccactgctgaaatgctggtggcggccggcgccaaggtgatgctggtggacctgaatgccgacgccgtcgcggccaaagccaagcagttgggagacaacgcgcgcagtgccgtggcagacatcagccaggaagcctccgccgaagcggctgtgcaagccgctgtcgccgcgtttggcggtttgcacgggttggtgaactgcgccggggtggtacgcggcgagaaaatcctcggcaaaaacgggccccacggcctggccagttttgctcaggtggtcaacgtcaacctgatcggcagtttcaacctgctgcgcctggccgcggcagccatcgctgaaaccgaagcgaatgccgacggtgaacgcggtgtgatcatcaacaccgcctcggtggccgcattcgatgggcagatcggccaggcagcctacgccgcgtccaaaggcgcgattgccagcctgaccttgcccgccgcccgtgaattggcgcgcttcggtattcgggtgatgaccatcgcccccggcattttcgaaaccccgatgatggccggcatgacgcctgaggtccgtgactcgctggcggccggtgtgccgttcccgccacgcctgggcaagccggccgaatacgccgcgctggtacgccacatcatcgaaaacagcatgctcaatggcgaggtgatccgcctcgacggtgccttgcgcatggccgccaagtaaggagaaacatttatgaacgatcccattgttatcgtcagcgccgcgcgcacgcccatgggtggcttccagggtgacctcaaaggcctgaccgcgccgcaactgggcgcagcggcgattcgtgccgccgtcgagcgtgccggtatcgccactgacgcggtggacgaagtgttgtttggctgcgtgctgccagcaggccttggccaggcacctgcccgccaggccgccttgggcgcggggctggataaggccacgcgctgcaccacccttaacaaaatgtgcggctcgggcatggaggcaacgatactggcccacgattcgttgttggccggcagcgtcgatgtggtgattgccggcggcatggaaagcatgtccaacgcgccgtacctgctggaccgcgcgcgcagcggctaccgcatgggccacggcaaggtgctggatcacatgttcctcgacggcctcgaagacgcctacgacaaaggccgcttgatgggcaccttcgccgaggactgcgccgagcacaacggtttcagccgtgaagcccaggatgctttcgccatcgcgtcgctgacccgcgcccaggaagcgattacccacggcagttttgccgccgaaatcgttccggtgcaggtcactgtgggcaaagagcagaagaccatcttgcacgacgagcagccgcccaaagccaagctggacaagattaccagcctcaaaccggcgttccgcgaaggcggcaccgtgacggcggccaactccagctcgatttccgacggcgcagcggcactgctgttgatgcgccagtccgaggcgcaaaaacgcgggctcaaacccttggccgtcatccatggccacgcggcctttgccgatgagccggggctgtttccggtggcgccggtgggcgcaattcgcaagctgatgagcaaaaccggttggaacctgggcgaagtcgacctgttcgagatcaacgaagccttcgccgtggtcagcctggtcaccatgagcaaactggaaatccctcacgagaaggtcaacgtgcacggtggcgcctgtgccctggggcatccgattggcgcatccggggcgcgcattttggtgaccttgctctcggccctgcgccagaaaggcctcaaacgcggcgttgccgccatctgcatcggcggcggcgaagccacggccatggccgttgaatgcctgtactgaggagcctccatgttgccagatgacgaacaactgcaaatccgcgaggcggcccggcaatttgcccaggagcgcctgaaaccctttgccgccgaatgggaccgtgaacaccgctttcccagggaagccatcggcgaaatggccgaactgggctttttcggcatgttggtgcccgaacagtggggcggttgcgacaccggttacctggcttatgccatggcccttgaggaaatcgccgccggcgacggcgcctgctcgaccatcatgagcgtgcacaactcggtggggtgtgtgcccattctgaagttcggtaacgatgcgcagaaagaacaattcctcaagcccctggccagcggcgccatgctcggtgcctttgccctgaccgagccacaagccggttccgacgccagcagcctgaaaacccgggcgcggctggagggcgaccattacgtgctcaacggttgcaaacagttcatcacgtccgggcaaaatgccgggatcgtgattgtgtttgcggtcactgacccggccgccggcaagcgcgggatcagcgcatttatcgtgcccacggattcgccgggctacaaggtggcgcgggtcgaagacaaactcggccagcatgcctctgatacctgccagatccttttcgaggatgtgaaggtgccagtggccaatcgtctgggcgaggagggcgaaggctacaagattgccctggccaacctggaaggcggccgtgtcggcatcgcctcgcaatcggtgggcatggcccgcgccgcctttgaagccgcccgcgactatgcccgtgagcgcgagagcttcggcaaggcaatcattgagcaccaggccgtggcctttcgcctggcggacatggccacgcaaatcgccgtggcgcggcagatggtgcattacgccgccgccctgcgtgacagcggcaagcccgcattggtggaagcgtccatggccaagctgtttgcctcggaaatggccgagaaagtctgttcggccgccttgcaaaccctgggcggttacggttacctgagcgacttccccctggagcggatctaccgcgatgtgcgggtctgccagatctacgaaggcaccagcgatattcagcgcatggtcatctcacgcaatctttaaggagccaacccatgagttacgaaaccattttgctcgaaatccagggccgcgtcgggctgatcacactcaaccgcccgcaagccctgaacgctttgaacgcgcagttggtcagcgaattgaaccaggcgctggatggcctggaggccaacccggaaatcggctgtattgtgctgactggctcgaaaaaagccttcgccgccggtgccgacatcaaggaaatggccgagctgacctacccgcagatctacctcgacgacctgttcagcgacagcgaccgcgtggccaaccgccgcaagccgatcattgccgccgtcaacggcttcgccttgggcggcggctgtgagctggcgttgatgtgcgacttcatcctggccggtgacggtgccaagttcggccagccggaaatcaaccttggcgtactgccgggcatgggcggcacccaacgcctgacccgtgccgtgggcaaggccaaggccatggaaatgtgcctgaccgggcgctttatcgatgcggtggaggccgaacgctgcggtattgtggcgcgtatcgtgcccgccgatgatttgctggaagaggcgttgaaagtggcgacgttgattgccggcaagtcggtgccgatcagcatgatggtcaaggaaagcgtgaaccgcgcgtttgaagtcagcctgtctgaaggcgtgcgctttgagcgtcgggtgttccacgcggcgtttgcgacgctggatcagaaggaaggcatggcggcgtttgtggccaagcgcgcgccggcgttcaaggataagtaagtaatcctctaacgctgaagatcaaaagatgggagctggcttgcctgcgatgctgatacctcggttcacctgcctgaccgaggtgatgctatcgcaggcaagccagctcccaccgttgaacgcatttcaaaggatggacccggttccctgtgggagctgtcgagctttagcgaggctgcgatggcgatggggcaggtgacatttctgtttgcagtgccgacgtcttcgcaggcaagccagctcccacctttgaccgcattccaaaagatggacccggttccctgtgggagctgtcgagctttagcgaggctgcgatggcggtgggtcaggcggcatctctgttggcagtgccgccgtcttcgcaggcaagccagctcccacctttgaccgcattccaaaagatggacccggttccctgtgggagctgtcgagctttagcgaggctgcgaagggatcgcctcggtttcactgacaaaccgaggtgcccgtatcgcaggcaagctcctacatgggttttgtgctgtgctcgttagagcgggtagttcttgagttcccgcgcaatcaccatccgctgaatctcgctggtgccctcgtaaatctgcgtgatccgcgcatcccggtagtaacgctccaccgggtaatcctccagatacccatagccgccatgaatctgcatcgcggatgaacagactttttcagccatttccgaggcaaacagcttggcctgtgaggcctccgacaagcacggcttgcccgcgctgcgcagtcgcgcggcgtgcaggatcaacaggcgtgcggcgttcagttgtgtttgcatgtcggccagcaggttggccacgctctggtgctcgatgatcgccttgttgaattgcacacggtcccgcgcatagaccagcgccgcctcgaatgccgcgcgggcaatgcccaaggcctgggcggcgatgccgatgcggccgccttcgaggttggacagcgcgatggccaggcctttgccgcgctcacccagcaggttggcttcggcaatggtgcactggttcagcgtgacggcgcaggtgtccgaggcgcgaatgcccatcttgtgctcggtgcgatccaccacaaaccccggcgtatcggtcggcacgaggaaagccgaaatgcctttcttgcccagctccgggtcagtgaccgcgaacacaatggccagtttggcgcgtttgccgttgctgacaaactgcttggcaccattgatcacccattgaccgtctcgcagttcggcacgggtgcgcaggttatgcgcctcggaaccggcttgcggctcggtcaggcagaagcaaccaatagcctggccgctggcgaggtccgccagccaggtttgtttctgttcatctgtgccgtagttgagaacaggcccgcaacccactgaattatggatactcatcagcgcgccagtggcaccgtcacccgcagaaatctcttcgaccgccagggcatacgccacgtaatcgacataggtaccgccccattcttccggcaccaccatacccagcaaacccaactcgcccatctttgccactagcgtgtcatcgatccagccagctttttcccaggcctgggcgtggggtgcgatttcgccacgggcaaagtcgcgtgccatgtcgcggatcattacctgttcttctgtatattcaagatcttgcatgtcttatctcgcaacctgcttgaagttatggaagaagctttcgacgtgggccgcatccagttcattgacggtggccgggttccagcgcggggctttgtccttgtcgatgatcaacgcgcggacgccttcgatcaggtcgccgcgttcgaaccattggcggtccaggtgcagctccagggcaaagcactgctccagcggcaggcggcggccccggcgaagcatctgcagggtcacggccattgccagtggcgagcgggtttgcatcaggcttgcggtggccagcgcccattcatggctgtcagcaacggtgacctgctgcagttgctcgacaatgctgggcacgtccggcagggcgaagaagtggtcgatggcggggcgcagggcggccagtggcgcgtcgggcaattgctgcacggccagcttggcgagcacgccttgcaggtctttgagcggcgaatcctgccactgcaggcggtcgagtttctggtcgagttcggcgagtttggcgctgtcgatgcaccagtcggccaggccgcaatacagcgcatcggcggcgcgaatctgcacgccggtgacgcccaggtagatccccaattcaccgggaatgcgtggcaggaagtagctgccgccgacatccgggaaataaccaattgccacctctggcatcgccaagcggctgcgttcggtgaccacgcgcaggtcggcgccttgcaccaggcccatgccaccgcccaggacaaaaccgtccatcagggcgagcacgggtttgcggtaatggtgaatggcgaggtccagcgcgtattcctcgacgaagaaatcctcgtgcagggtgtcgccgtttttgaagctgtcgtacagcgaacggatgtcgccaccggcgcagaaggctttttcgcccgcaccgcgcaggaccacagcgtaaatcgccgggtcatccgcccaggcttgcaactgcgtggtaaggctgcggaccatatccagcgtgatggcgttcaggccggcggggcgattgagggtgaggtggccgatgtggttgcgaacctcggccatgacttcgtcctgaaagatatcggcttggcttgcttcggatgaaacctgagcagtcatctctaactccctgcttttattgttctttatcaagatgttcgcgggcgaaccatctcgcgatcgtaccagtgcaaatttgcccagtacaacccggaatcctgcaggtcgtttttgcatttatgcagcgcgggtcaagccgcgcggctggccaggacttcaccgatgctgcggcggcgcgcatggccttcggcggcgtggatcagttgttccagttcgttcggttccacatcgtagaattgctccatttgcgccagtgccagcttgaggtctgcggccgtgatcgaagggtcggcaaccggggcagtattgcccatcactattgcaggcgactctgcgatgcgtttgggataacgcgtgcgcgtggcattgttgaaggccagcgcgcataccaacagtgcggcggcgcccagcatcacgggggccagctcatgccagccaagggcgatcgacgcggggtcggccagaaccagggtcatggccaggccgccggccggtggatgcaggcaacgcagccagcacatcaacacaacgctcatgccggccgccaggcacgcgctgcccaaggtgcgccccagtacccgggcgaccagcagagcaaccacgcccgcacacaaatagctgccaatgattgaccacggctgcgccagtgcaccggaagacaccgcaaacaacagcactgcagacgcacccagcgggcccagcaggtgcagcgcgacctccatgccaaacacctgggcacataaccaaacgctgaacagtgtgcccaaggccatgccgatcgcagcgcggctccattcggcaggacgtgtgttgatggcggcagggacaaggcgagcaagcattattgaaggggtcctgaaacggcgggcgaaaaaaaaggcctgcctggtttcccggagcagccctttgaaagttccaacatttgggggaggaacgctgcgcagtgtgccgaccttgaacgcgtggcacaaatgcatattaatgaaggttgaatgcaaaaataatgcgcttaataggtgagtggccgtttgacgacgcgcgtactgtcttttatcgactcctcgtccattaacacgcgtctatacaggctctcgcagaatgcagggttgtccgccagcgggcctttcaatgcaaccaatgcattgcgcaggtccatcaatcgatacagcgtcggccccgggataccggttaaatcttctcgcacggcaatgtccttgtacggcaatggcgacgcggtggtagagagttattgcgtttggcaaacgagtctacatttgggttccggggacaggaaggcaaagcgcaccagccattacgtatagcgatgtaggtggtttcttgcagccaataacgaaaaacgcccactccttgcgcagtgggcgttgcttcttacatttttgctcaaagtgctatcaaggtgcggcggctttagccagatgcaacagcacataggggtctttatcaaacgtgccggtgagcgtcggggtgatcgaacgcaagcgcgggtcttgcagtttctcgaagtcctgcgcactcatcaccaaccaggcgggcgcttgcagcggcgccaggtcagcggtcgactgagtaaacaggggcactttatcgcaattgaaattgaccatgaacttgatggccttcgcatccttgcccaagccatgcaataccaccggggccggttgctcaagtatttgcgccttgacggcaagggtgaaggcgcgggtgtcgtagagcgcacgctccagtggctcaacgaccacgatataagtcgaccagagtgccaccacggcggcgaacgccggtgccagcgggcgcagccgggccttcagcaagcccaaaagcgcgagcatttgaagcactgcaagcagcgtaaagatcagccccaggctatttaactgctccggataccgtcgctgagcgaccaccaacccaaccgccagcagtgccggcaacagcgtccacagggtcagcatcacgccacgcagaaaaccgaacaaccgcccttggctcacctggaagggataggctgcaatgatcgctgccatgggcagcatcggcagtatgtagcgcgccttctttgcctgaggcacagaaaggccgagcatcaccagcacaccggcggctgcgcaatacaacaccaactgcagtgccgggcccggcgcacgccgcccgccaaccgcgacggccaacaacaccagcagcgccaacggataggccagggcgtagttgcccagggagctggtgaagtaatacaacacgccgctggaaccttcggtgccatccatgcgccccaggaattgcatgcggatcacgtcctgcatgaattcctcgccaccgctgagcttggccagcagcagcaacaggccgacgcaggccgccagcaatgccagcgccagcaacccgaaggtgaacaactggcgccactgccggttcagcaagtagtagctgcacaacacacccgttggaatcaccaggccgatcggcccacggatggcgaacccgaggatcagcagcaagaacagccagtgcaggcgcttggggctggcaaagtgatcatgggcgtaacccaggtagaacaccgccaaggcgactgccgcgagcatctggtcgagtgacaccgcgcgggtttcactgatgaaggtgctgctgagcagcagcatcgcgatgctcaacagcccccagcgcgtggagtagggcgccgtgaggcgatacaccagcgtcacgatacaggccgatgcgatagccgtcggcaaccacgcggtgaagctgctgacctcacccaaaggcaaggaaaacagccaggtcagcagggtcgaggtcgccaggtaatccgcgtaaggctgcccataggtcgtggggaaaaaactcggcccgtggcgcagcatttcctgggcgaacagtacgaaacgcgagtcaaagccgataattgcctggtgccaattaccgacgataaacagcaccagccccaggagcccaagcgccagtgactggtgacggatcgttgcggtgagcagggggggatgcactttgttcacgtatcaggcttccttcgcctgcgagacccagttttgctgaggaatcggcagttcacaggaatcgccacggcccatcgggaagtacttgaagcctttgcgggccaagcgctcgccgtcatacaggttgcgaccgtcgaagatcaccgggtttttcaggcgatcgtgaatcaggtcgaaatccggcgccttgaattgctgccactcggtgcagacgatcagcgcatcggcgccgctcagcgcagactcgggcgtgcccagcagggtcaggcgcgactcgtcaccgtagatgcgttgggtttcctgcatggcctccgggtcgaaggcgcgcacattggcgcccgcggcccacaaggcttccatcaacacgcggctgggtgcgtcgcgcatgtcgtcggtgttgggtttgaatgccaggccccacagggcgaacgtcttgcccttgagttcgcctttgaagtaggcattgatacgttcaaacagcttgctcttctggcgctggttgatggcttccaccgcttgcagcaggtcgctgttgcagttggcttccttggcgctgtggatcagggcgcgcatgtctttggggaagcacgaaccgccgtaaccgcagcccgggtagatgaagtggtagccgatacgcgagtcggcgccgatgcccaggcgtacggcttcgatgtccgcccccaggtgttcggccagctcggcgatctggttgataaagctgatcttggtggccagcatgcagttggcggcgtacttggtcagctcggcgctgcgcaggtccatgaagatgatgcggtcgtggttgcggttgaacggcgcgtacaggtcgcgcatcacttcacgcacttcttcgcgctcgcagccgatgatgatgcggtccgggcggcggcagtcggcaacggccgagccttccttgagaaattccgggttggagacgatatcgaattccaggtggcggccggacacccgcaggcttttctcgatatgcgcgcgcagggtgtcgccagtgccgaccgggacggtggatttttccaccagaatcaccggttccacacggtggcgagacaccgcatcgcccacggacagcacgtatttcaggtctgccgagccgtcttcgtcggacggtgtgcccacggcgataaacaacacttcaccgtgttcaacggcgagcttttcatcatgggtgaagtgcaggcgaccgctttccaggttttccttcaccatcgcagccagccccggctcgaagatggtcacatggcctttttgcagggattcgaccttgttcttgtcgacgtccatgcagatcacatcgtgaccgacttcggccaatacggtggcctgcaccagaccgacgtaaccactaccaaatacactgattttcatggggcattcctgggacttgtggtgctagcacggcgagagttaataaccagtactccgaggatgaccagtgccacccccagggtttttgaaagcgaaaaatgttcgttgaataccggcaggctggcagccagcaggtagaccaaggcataactgatgctgagcagcgagtaagcacggcccaacggcaaatgtttgagtgcgccaagccagcagagcatcgacagcgcataggcgatgattgcaagagccaccgcgcccagggcgccaaagtcgatggcgttgctgttgaaagcgttgagccattcggtgggcaacggcaggcgcgtcatgctccagcgcatgcccaactgggccgcactgaccaggccgacactgccaagggccagggcaaaaccttgagcccggctcatacgtgacgccccagcagaaccacgccgccgatgaccagcgccacacccagccagtgacggccatcgatgtgctcatgaaatacaaagcgcgccatcagcgtgaccagcacaaaattcagactcagcatggggtaggcgatgcccacctccaggcgctgcagtaccagcagccagaccagcaggcccaggcccaggcataccagcgccgaccacaaccacggcgagcgcaatttcggcgcccagccatcgggctggtcgcgccagctttctacggcaaatttttgtgaaacctggcccatgcacgtaagcaggcaggcgccgagcaagagaaacaacgtgatcattgcgcggcctgtgggaagatcagaatcaccaggttgccttgctcgtaacgcttgccgtcctggggcagcaggttcaattcggccacttcgtcgtcgcccttgacccgcatgaccacgccgaccgaacctttcttgcgggcgtcgctcatccattgctggacggcgttggtgtcaatccggcggtgagcggtgtccgggtaggcgatgccgtatttcacttcgccaacggtgttgtagagcgcaacgtccggtcgccccacgcgccatgacagcgccgaagcggcacccaggtcattgctgagcaaggagccggtcgcttgcaattcctgctggtgatcgatgatgaactgatccggaatcttgttgtaaaccactgaatgcggcagcgcggccggcaccagggccaccagcagccagctgccgatgaccggcgcggcccacagtttcaacgggcgcgcggcttgcaacaggttggcgatgatccagccgatcaggaacacaaacaccaacacaaggctgaaggtttcctcgccgtgttcaaacaccggttttttcaactggaaccagctgattgccagcaatgccagcacgccagcgaccaggttcaaccaaccgttgaggcgcagggcgcggccatgcccctgggccagcttgtcgctcagggtagagcccatcagcaacgccaatggcagcaggcacggcatgatataggacggcaatttgcctttggccaggctgaaaaacgccaggggcatcagcagccacagcagtatgaaagcggttttgggcaggcgcttttccatccacgcctgtttgaccgtggacggcaacagcgcaatccagggcaacgaaaacgcgaccagcagcggcaagtaaaaccagaacggctcggcatgttgggcatcctccccggcgaagcgctggatatgctcgtgccagaagaagaagttccagtaatccggctcttgcacgtgcaccgccagcgcccagggcaagctgacgacaatcgccacgacgaccgctaccacgccataaccgagcaattcacgaaagcgtttctgccagatggcgtagggcagggcgatcagcaccggcaacagccaggccaggaagcctttggtcatgaagcccatgccacaggcaaagccgagcagggcccatgaccacaggcgcccctgacgcgtggtgctgtcaaagcagaaccacagcgctacgccggtcaggttgacccagaaggtgaactgcgggtccaggttggcataaccgccgagcagggccacgctgacaaagctcatgtacagcacggtgctgaccaggcttttctgcgggtcgttccacaaacggcgcgacaccaggtacaccagcacgatactcagcccggtgctcagcgccgacgcaaagcgcacgccaaacaggttttgcccgaagatcgcctggcccagcgcgatcatccagtaaccggccgccggtttttcgaagtagcgaatgcccatgaagtgcggcgaggcccacttgccggtcagcagcatttcctggctgatctgcgcgtaacgggtttcatcgggaatccacaggccgtgactggccagcggcagcaggtaaaacacgccaaacgccagcaggagcaggggtaatgccaaacgccggatcatgcctgctgcactccgagccaaccctcgcggccaggcaaggcgccacgcaccagctgttgctggggcagggtggtcacgtccgcgggcaatagctcgcccaggggtttgaagtcgataccgcgctgcccggcctgggccagcagttggcgaaaatcttcagccatcagaatcccttctacttctgcgtggatcgtgtagacgttcagcttcgactcggcgaaccggtcaagaataaagctgttgaagtctttggcagccactaccggcccgacgacttcgtcgaaggtcggcaggtctaccggaatttgtggggtgcccgcgctgccatcggccaaggttggacgaaacaggctggtgccccggcaatcgctgttgtagcgaaagttgaagccttgcttggcttgcaccacgcgctcatcggcacgccaaccggcggccgctgaacagtcgatgcgctcaccgaggatgtcgctcaaggtgtcgacgccacggcggatctgttcgatcagctgtgcttcgctccagcgcccggtgttggcctgccagccgtggtggtcccaggcgtgcaggccgacttcatggcccgcagccttggcctggcgcatcaagtgccccaggtcacggccgatcggcttgcctggccaggcggtgccggccagcaggatgtccaggccatacaggcctactgcattggaacgcagcatcttccacagaaattgcgggcggatgaggcgccacaagtggcgccccatgttgtccggcccgacgctgaagaagaacgtcgcttttatcccggcttcgtccagggattcgagcagccgcggcacaccttcacgggtgccacggtaggtgtcgacgtcgatgcgcaagcctgccttcattactttttgtccgcgatttcgagcatggcttcacgcaggaagaaatccagggtgttgccgatggtttcgctcatctcaacggtaggctcccagttcagcaggcgcttggcgttttcgatgcttggtttgcggtgtgccacgtcctggtaaccggtgccgtagaacgccttgctttccacgtcgcggaaaccggcgaacggagggaagttgccacgcagcgggtgagcttcgaactggcgcagcagctcttcgcccagctggcggatgctggcttcgttttccgggttgccgatgttgacgatctggccgtcgcacacaccgttttcgttatcaatgatgcgggccaaagcctcgataccatcagcgatgtcggtgaagcagcgtttttgctcgccgccgtcgaacaggcggatcggcgtgccttccaccaggttcaggatcagttgggtaatggcgcgggagctgccgatacgggccgaatccaggcggtccaggcgtgggcccatccagttgaacgggcggaacagggtgaacttcaggcctttgtcgccgtaagcccagatcacgcggtccagcagttgcttggaaaccgagtagatccagcgttgcttgttgaccgggcccaccaccaggttggaggtgtcttcgtcgaagtactggtcctggcacatgccatagacttcggaagtcgacgggaagatcacgcgcttgttgtacttgacgcagtagcgaaccagtttcaggttctcttcgaagtcgagttcgaacacgcgcagcgggttacgggtgtattcgatcggggtggcgatggccaccagcggcaggaccacgtcgcacttcttgatgtggtactcgatccactcggtgtgaatgctgatgtcgccttccacatagtggaagttcgggtggctgcgcaggcgctcgatggcgtcggaaccgatgtccaggccgtagatttcgtagcggtcgtcacgcagcaggcgctcggacaggtggttaccgataaagccgttcacacccaggatcagtacgcgggtacggcgtggcttgcggccggactcggcgccgcgcagcacggagccgtctaccaggcccagtacatccgccagggccgggccggccaggaacaggccgtcggcgttgcgctggccgaacttgaccaccagggagtcttcgccgcacgcaatgcgcagcgggttgacgctgatcacacggcctggcgccaggccttcgttgcccttgaccacgtcggcttgccaaacgatcagtttgtgttcgcccacggcgcagaaggcgcccgggtaaggttgggtcacggcgcgaaccaggttgaacagttcttcagccggttttttccagtccaacttgccgtcagccgcagtacggcgaccgaagtaagtggcttggctttcgtcctgggcggtttcgctcagcttgccggcagccagttgcggcagtgcgtcgcgcagcaagttggcggcggcttcacgcagtttggcgtgcagggtcaggccggtgtcggtgcggtcgataatgactttctgttgagccaggatcgcgccggcgtcagcacgtttgaccatgcggtgcagggtcacgccggtttcggtttcgccgttgaccaggacccagttggccggtgcacggccacggtacttgggcagcagggaaccgtgcaggttgaacgcgcctttgctggcggtggccagcaacggctcgctcagcaggttgcggtagtagaaggagaagatgtaatccgggttcagcttggcaatgcgctcgatccacagcgggtggttggcgtcttccggtgcgtgtaccgcaatgccgttgcgagcgcacagttgggcgacggaaccgtagaaattgttttccttggggtcgtcggcatgggtgaacacggcagcaatgtcgtagccggcggtcagcagggcttcaatgcctgcacagccaatatcgtgataagcgaagacaacagcttttgaattcatgacgaaacctgatcggaaggagaagtagaggtatgggatgacaccaggccgtcaacaacgacgactggagccggtgctgccggttggttgcgcagcactttttcaataaagaagcgcgggcgggcccgcacatcgctgtacatgcggcccaggtattcacccaagaggcccatgccgatgaactggccaccggtgaacacgaacagcaccgcgaacaacacgaacatgccgtcaccggcccattgcgcgccaaaggccagacgcaggatgaccagcgcaagggcgaacagcacgcccagggcggccaggctgaaacccacgatgctcagcaggcgcaggggcgtggtggtcatgcaggtcagcaggtcgaacatcaggctgatcaaacgcatcgggctgtattttgactcgccatgttcacgctcggcgtggtgtaccaggatctcggtggtatgacgggcaaagccgttggccaggatcgggatgaaggtactgcgctcgcggcaggcgagcatggcgtcgacgatggtgcggcggtaggcgcgcagcatgcagccgtagtcggtcatggccacgccggtggagcgctgcacggccaggttgatcaggcgcgaaggccagcggcgaaaggccgagtcctggcggttgttgcgcacggtggcaaccacgtcgtagcccagggcggcttgctcgaccaggcgcggaatttcttcgggcgggttttgcaggtcggcgtcgagggtaatcaccacttcgccccggcactgctcgaaaccggccatgatcgccgcatgctggccatagttgcggttgaggatcaccgccaccacgttgctgccgtcttcggcggcggcgtcttcaagcaattgggccgaattgtcgcggctaccgtcatccaccaggatgatttcgtattcgtaggccagttgcttgcaggctgccgtcgtgcgacgcagcaattcaggcaggctctcttgttcgttgtagaccgggatgacgatcgacacgcaatgaatagggtagggtttcaaagattcatgacctcggggctagagcaggttggagcgtgaaaacagcagtcaccagtggctgagcgttcagtaacactgattacacatagcgtggggttgcggtattcattcgactttcctgggacgggcaatggtttcttccatggttgatcgtagtaaagacgataagtgtgaaaggtaaagcgtaatcaacaggttagtcgcagaacacgcggttcgttctcaggtcctgcggccaagattaagcggaaaaatgttgaacgaatatgaaaggctgatgaaaaactcgtttatttgacaggtagacagctagggttcagctaagtaactgacctgccaagagataccgattgcgagcaaaaaaccgcaggttttttcgagagtgccatcagtcaccgatttaattcaacaaacttctctgcattggccctcaagtgccggtaaagtaagccatctcttgccagggtgatcggatgaatagtgtgcagctgttgcgcggccagatacggcccgcgttgatgggattgttgatggccgtggcctgtgtcaccaccgtacgcgccgacgacggcgtcgcgctcaccagcatcgatcaggtgccggaaggcgttgaagtacgcggcaaacaagtcgcggcctacacctgggacgatcatcaaggtaaaaacctgctggtactcgccgagcaagtcagcgagcgcgacgacgacggcacccaatcagcctttgtctacgcggcgcaatacctgttgggtggcgatcaccccaagcgtgtgtggatgctgtatgacgacgtgcagcactgccaattcgacgcctcgctgcgttttgatatggcggcgaccaaggtcaccgacctgactggcgacggcatcacccaggcaaccgtggggtactcgcgcacctgcaccagcgatgtaagccccaatgaattcaagctgatcatgcacgtcggcaaatcccgcaaattccgcctgcgcggcgtagaccgtgtcggtgcgagctggtgggacgaggaagccggggccttgcgtggcatgccattgcccaaggattgcagcgttgctgcgcaacaggcgctggtcagccagtacaaggaacagggcaccgaattgccgttgccgggctgctatggcgatgaggatgactttgccaaggcgcccgacagctacctggcgttcatgcgccagcactggtttgccttgatgcagaagcaggacagcgattggagccagtcccaggttcagccgcaagacccggtcgatgacgaagagtgaatagccggtgattttgtacaagggccgaacgtgagttagactcggcgcttgccaaattcactaaatacctagactaatcaatgagttgttcgaggtatttaatccaaaggctgatctaccttgactgagtctatccgcaacccgttgaccctctatttgacccgcctggcgccctccagccaactgaccatgcgctatgtgctgcaggacgccgccgaccgcctgggctttgaagacaccaacctcgaagagatcgactggcacctgttgcagcccgaacaggtgattgccctggtggccgcgctgcgcgaagacggttatgcgccgaacacctcgtcgctatatgtgaatgcggtgcgcggggtgatcaacgaagcctggcgcctgagcctgatcagccaggatcatttgctgaaaatgcgctcggtcaaggccgccccgggcacacgcctgggcaacgggcgtaacctgcgccgcacgctgatccgcgaaatgatggaagtatgcgccgctgaccctcggcctcaaggcctgcgggacgctgcggtgattggcattctgtatggttcgggcatgcgcaagtcagagtcggtcaacctcgacctggcgcaggtcaacttcgccgagcgcagcttgcgggtgaccggcaagggcgacaaggaactgctcaaatacgcgccggcgtgggcattcgccaagttgcaggcgtggctggagtttcgtcgcgagcagctcaaggaaggcgagccggacgatacgtttctgttcaaccgcattcgccggggcagccatatcacccgcgaacgcatcaccaaacatgccatttattacatcgcccgccagcgcggcgaacaggtgggtgtgaagatcatgccccatgactttcgccggtcctttatcacgcgggtgattgaagaacacgacttgtcgattgcccagaaactggcgcaccacaccaatatccagaccaccgccagttacgatgtgcgcgacgacaatgagcggcgcagggcagtggaccgctttgatttgtaggaaacgtcagctatgcgagcagggggcgccgactcgtacgtaatccagctcgtggcgtacgccctggctgtcaacgtagaccacatggcccttgactggcccgcaggcggtcgtcgcggcctggttattgcgcacggctttggcaatgtcgaggtcttcggtgtaatcatcggcctggctggcgggggtattagccccagggtcgggggcgccctgagcggcggcgaaggtgctgaacaggctcagcaccgcaataagcaagtaacgcatggcaacctccagcacctttgagcagtggtgtgactgtggttgccattctattgagcccggcatcgggccagaacggattcctgccgataacggacatcagccaaaacaataattgggcagtgctcaggaggagggcggtgcactcgcgggatgagtcgacagccgatgcagggtccacagactgacgagcatcgcggcgactgcacacaacgcaatgccgaccagcatcggcgcgggagtgtggtcggcaaacacaccgacaaggctcatggacaacgcggccgtgatcatctgaatggcgcccaacagggccgatgcggaacctgctacagcgccatggtcttccagggacagcacacccaccgcgggcaacagcaaaccgagaaaaccgaagccgataaacagcagcgtcatcatcacgatcaagttgttgccccagaacgtggtcgcgcccagcaccgccatgaccgctgccgtggcgatcacggaccagcgaatgacaggggccaggccaaaccgccgactcaggcgcgctgtcagttggttcatggtgaaaaacgacgcggcgttcaaggcaaaacacaggctgaattgggtgggtgtcaggccgaaatattcgatgtacacgaacggtgcgctgccgataaacacgaagaatgtcgccaggccaaacccgctgactaacgccaaaccgatgaataccgggtcgcgcaataacccgccatagctgaggatcgctgaaccgatcgttttgcccagacggcgctcggcagggtgggtttccggcagttgcacggcggtcatcaccaggcacaacaccgacacaatcgccagtgcagcgaacacttcgcgccagctccagatcgagatcagcacactgccggccagaggcgccaggatgggcgacacactcatcaccagcatcagcaatgccatcaggcgggcggcttcatggccggtgtacaggtcacgcacaatcgcccggggaatcaccattccggcacatgcgccgaatgcttgcagggcacgaaagccgatcaacacctcgatggtcggtgccagcgcacagccaatactggccacggcaaaaatcaccaggcccgcgtatatcggcggtttgcgcccgaagacatcactgatcgggccgtagaacagctggcacacgccgatgatcatgaagaacaccgtcaggctcatctgaacggcggcaggcgaggcctgcaggctggcgccgagggtcggcaaggcgggcaggtagctgtcgatggcgaacgggccgatggcggtgatcaaccccagcagcaaggcgaggtgggcgatacttcgagacatggatattccggggtacggcgaaagatcggccagcttagagagtggcttgcgggtgtacaaggtggtggttacacagcccctacattttcagcctgcgtttcaacacagtcacccggatgtagcggggtaacaaaggaaaaaaccggcctcaagagccggctttgataccggtcaagcaaggcgcacgttgagatggttcgactgtgagcccagcgtactcgcgtcgtcttttggcacgacatagccctgaccgtcgcccaccgctgagcggtagtagctgaccacggagtcattgattacttcggcattcgtggttttcttcaggccgtagacgttaccgtgttcatcccgcgccttgatgctgtccggggcgccgctcacgatgtctttcagcgtgccggacaccgggccacccgcgctcggctcgatggtcatgcgggcgttgttaccttcgatatagctgacgtcgtagaacgtctgcttaccgtccgcgccaccattgaaagcgacttcaccgagcgtggcgttggcgccatctcccgtggtcgaacggaagttgccggaccagccttcggggaaggcttgcgccagcgattcgccgggcttgagtgtgatggagggaatagccgcctggttggcattggcggtgaacacgatcgtcatcggcgtatcgcgctcgttggtgaaattcagcgtattccccgccggcgcatccttggggtgttccgaagcaccgggggaggccgccggcaagggggcaggggtgggggaggcgtccgtcaccgaacttttcgccggcggtggttcgctggcacgcaccggggttggcattgcaccgctcggtacgccctccggcatcatcagcttcagcacatccagttcgttctggaagtgttgcgccaacgcctcgttgcccgacgccttggcctggtcgcgagcttcctcgcggcgcgtccattcatttttccaggcgctgttgagtgccgcatcgaatacagagccgctaccgccttgttgcggcaccgcattttgccccacgcttgcaactgacatggctcgctccttcaacaacgttaaagactgccgggatgatactcacaggcaggtcctgtacggttgtgaaaagctgttaaacaggtgaggggcgccagggtgctgccttcgatccagctcaaggcctgacaacactgaatataactaaactaaatgaccatttagtttagttatattgtatttgcatattaatcggttcaattcgaggcgagggcgggtgtacgccgatcgcggattcgctcgactgtctgccgatgttcggtaccccaggaacagagcgcgcccagtgccatggccagggaacgaccgaaaggtgtcagcgaatattcaaccttcggcggtatttcctgaaagtcgttgcgcaagatgatttcatcgcgctccagctctttaagctgctggatcagcaccttgtcggtcacgctgccaatggcacgccttagctcaccataccggtgaacatcttgtgccaaatggaaaaggaccagcggcttccatttgccgccaatgactgcgagcgcggcttcaagcccacaattgaaactgttattagccatggtttactcgccagatcaggtacttactaaaaggtgcatactattcaaatagaaaccgtagatctacagtcgggcctcaacttttacgaggcaaccctcatgagcaggctaaacggaaagattgcagtgatcacaggcggcaacagtggcatcggcctggccgccgccatacgttttgcggccgaaggcgcacaggtggttatcgtaggccgccggcaagaggagttggacaaggcactgtcactgatcggcgctggagccatcgccattcagggtgacatttccaacctggacgaccttgatcgtatctacgcacaggttgaagccgataagggccggatcgacatcctgttcgcgaacgcagggcttggcgacttccagccgatcggttcaattactgaagcatcgtttgatcgcacctttggcatcaacgtgaaaggcacactgtttaccgtgcaaaaagcgctgccactgatgcacagcggcagctcggtgatcctcacgggctcgacgaccgccaccatgggcacgccagcgttcagcgtgtacagcgccacaaaggcggcattacgtaatttcgccagaagctgggcgctggatctgaaaggcaccggcattcgtatcaacgtactgtcgcccggaccaatcgcaacaccagggctggacctggcgctttcaggtaccggccagaaagatgcaatcatcaccgagatggctgggcaggttccactggggcgcatcggccagccggaagaagttgctgctgcagcgttgtttctcgcatcggatgagagcagcttcataaccggcagcgaaatgtttgttgatggcgggtttgctcaggtctgacattgaaggggatttgcctgttgaaatctgacggggactgcccctgattatgcaactcgatattacgcataatgtatattatgttaaatcaggtgctatgtcagatacgttcataacgttcataagctattgattcgacaaactagcttctgtcatccagtctcttaacgggccatgtccttcgtgttcatggcgagtcattcaatgaggtggctgccgatgaagctgattcagtgccgtttctcttcaggtcagcgtgtaccgctgctcgtgcagaccggtaatgcaacaccgttgcccatacttgtcccgttcatctacgttcaactcaagctcaggcaccgcgcttacaacactgcggcggcgcatctacgcgcgattcaggctttctatatctatgccaaaagccgtaacctccatattgatgacgccatcttggcctgccacttcgagtcgattctggctttactggacggttacgccatatggctccaaagcggccgtcaagccgacaacctggtcgcccgaatcggcacagttgaaacggcaccttttccgcagattgatccgcgtacccgtgaccagtacctgcggttgctgaagcagtacctgtcctggtgcgtcacccgttacattccgcgcgctcgtcagaactcaaccaccctggctaacattgaagttgtatttgcagatgtcgccgacgtcattgagcggcggtttgagagccatatcatcaatgctcggccagaccgcactcgttaccgaagcctgacagatacacaactccagatcattcgcacactgattcgcccgggcgatgcagagaatccgtttccggagcgactgcagttgcgcaattggctaatgattgaattgctgctggagactggtatccgtcgcggagagcttctgaagctctacaccacggatatcaatcagggctctcagcacgcctatgtcagcatcaatgatcgcgaacatgatcccggggacccgcgtgttgaagagcccgcgctgaaaacacacggacggacagtaggtatttccgcgcagttgtatgaggtctacgagcgttatatccagggcgagcgacgtcccctgcgtgacggcaaaccgatgaaattgccgtaccgctatctgttcatctctgaccgaggccgtccgctgtcgattcgcgccttgtctaacgtccttgatcggctgtttctaattattgaactggctcatccagggttattgcctacactttccgcgcatgactttcgccacacttttgccgaccgctttttggcttacctggtccagcagcgtgggcatgacctggggcgagccacggacgaactccgacgagtctgcggttggtctgacacctcgactatgccacgccgttatgcaagtcgttatctagccgagtcggccaacatccacaacgcccagcgtgcctcggcagcctggagtcgacttgacagttaaggaggttcgccgtgactaaatcagccgatcaagaacacgcttcaccctcctcctcttttccggcctacgtgttcgagggcccagcacaggttgcgattcgagctcggactgatgaccagccaaggtacgtcgatactcggttgagcgtctggacgtggtacgacggtggtatggcaatgaatattgattggtctggcctaaagctgaattcagaatttatcgaaatagccaaatcatttatggtccatacgttagagaaatactccccttcaactgcatatagggccgcgagaatgctccatcgggtttcggaaagtgatatttccttgaaattcccttgggcagccaatgaaattatcagcgcattcaacagttggaactgctctagagagtatgtagtcgtctttcgtaccctttatcgctgggcaagggatagaggaatcacaggattcagcaacgatatttatctaaggatcaaggatttcaaaaccgaacgctcagccccctactctcgaatttttctctctcagtccggcttggaactcgatgaggaaattcgcctgctcaagcgtatagagcggaaggttccttcagataactgggtggatgctcagttcaatatgatgcttcacctgagttttgaattggggccgcgttcgattcaatttcattcgctggagattgcagattttgaggttatagaaaccgtagaagatgagaagtactacaccctttggttacccatggccaagaaggttggccaacgtcgaccagagcgaaggcctcgcaaagtaactacccggctgggtgaaaaaattgaacagcatatcttggggcatcaacgtcgctttggtagcgcgtgcaagccgctgtttgcgagcctcgacgggaaacgtctctcagtgcgagagatcggagatgctctcaagtacgagttgtttgaggcaggcatagacaaacctaatcaggtgtccattctactgcgccaccatctcggacaaggattagcggatcaaggaacgcccgcagacatgatcgccgaactgctcggccacaatagcacggtcgcggcacgtgcctatgtcacagcaacccccaatattgcccggatcaaagagaaagcactcggtaagagcccgtcctatcaacatatcatgcacagtctcttgaccggggaagtcgtacaacgccgcgataccgttgccgaaagagcgatccgtggcgttatcgatacacagtatatcggggacattggtgcctgcgcgctcccagtccatacgcactgcccctacaatcctgtctacgcctgctacacctgccagaagtttcatccctttactgacggccgccatgagcaggtgaaagaggcgcttcaacgagaagcccagcggttcatagatatggcagaacaagccggtgatctcattcacaaccggcccctcgcccaacatcaggcaactatcctggcggtaagcgctacgatcgagcgctgccggcagcaatcggaggatgccgcagatgatgctgtctagggcaaagcagagccttgaaagctttattacacaggagcaagcgatttttcggtcattaccgatttcaacaccgtggtctgaaccattgtggagtatcggaaattggttaccgcaaagggatgttaacaaacatgcacttacgttcgagacgcaccgacaagccctagaaaagacaggttatcctgcaccgaacaaggggccactcccctttgcgttccaggactttagcaaggccatgattgtatatttacaacgcacccgaaggctgaagttttcgatggtgactgcatacaatattgccgtccgacggctgtacaaccctctgtttgagcgcggcgtatccgacccaacacttttgacgcgaggcgatttcgaccgcgtcgtaggctttctccgcgagagtggctacaagaacttctatgacgcaatttctcatctccaagtaatagcggatacgatcgataatcaacaactaaccgagatcgctatccactttgagcatgatgcgagaccagagaaacgtcgccacgattatatttcattgcatgatcctgatcgtgctgtaaaacagcgaaaatctgatgaccggctaccttctcgcgaggcgatggaagcgtatgccctgtgttcgaataacccgctcagtgagggcgaggaaatattgctgcgcgtgatcgacttattgatagcgacggggcaacgcggaaatgaagtagcagtaataccctatgactgttgggttgaaaggccgataaaaggaactacaggagaggtagttgtcgatgtcaatggcaaggctctggtcgaatgcgggattaggtattttgcggaaaagcagtttcaatctcgtgttcattggttcgcagaaagcgacattcctttggccaggcgtgcggtcgaacgactgaagatgctgacgaaagaacagcgagaaatcgctaggtggcaagaagcccatccagggcgcctctgggattactcgccgcaaaaggaaatgtcagaggctgaagttttaagctggctcggatttagtcagaatcgcgacacttctcggaatcttcatgcgtatttttggcgaaacggaattcatcccatcaaggagatgaggcgcaaatacttggcaggtgatattgagcgttttctcgttcctaaacttcgaggccatgcagcgttggcggataatgtaggagactcgcttcgtatagtcctaaaaacaagcgaaacattagccatcgcattcgatggtcaattccgcctcggagggcgggaagcgaatgtgtttcgagcagtcccccgtcgggtgacccttttggatatcaatcacgcacttggtagcgatgaaaaacgcgcatccattttttcgcggagatcattgaccgagtctgatggtactccgattaaattaacgagccaccaacctcggcactggcggaataccatttatcacttgacgggtatgagcgatgttcagcaagcgttggctctagggcgaaaacgcctcgaccaaaataaacattatcagcacacgactattgaagaaaacacagctgcccatcagcagtttttggcgttcaacagtcaccacgagcgcatcgatttcctgcacgcaggcataagaggtaggcgcatccagggagcgctgaccgacagttaccatgcgttactgttagataaaggcacgtctacagccgaagcattcctcaccgtacatgccacggcgctgcacgtgacaccctttggaggttgcattcacgatttctcccaagcgccctgccctaagcatcttcagtgctggaatggctgctcgcatctccatttgatcggtacaacatccgagcgggccaaccttaaaaaacaagccaagaatcttacaaaagcaatttccatcatgcgcaagtcaggctcgggagaggcaggaagcgatgtttggctggcggaccaggaggacaagctcaagaatttaaaatccatcctcgcacgcgataccaatacaggtgtacagcgcgtatttccaaatgggcatcccatgacggttgcagacacggacaaacggcacagttcggtttcagatgattagaggcgaccatggcgcaacgacgggcattgaggggcggcgctttggacgaggcgatcgacgccctcctcgcccaaatgattagcttaggattggaactcgcgcctatctcacgccccgaagtacagcgtcgattgggcctgacgagccgcgcgaccttagtgggagagcgaggtcggcgaatcgagtctgcccgtatcgcacaactgaaggaaagcggaagagatccggatggtgcccgccggcgaagaagcttcgaagagcgtattgctaatctgcaagcggagaatgccgacttgataaaacagcgagaccagctctatgaagcgctgtcgacaattgcgcataactgtctgctgaaaggactggatgtcgagaacatcctgactccattacgaaagcggtaagtggcagtaagttgtatcgcctctggtagacgcagcgagcgcgcaagattgcctaaccagaatagccagttatcttacctgttgtcgcggcaaagtgccgagtctgatatttcagcaggcttttcatctgcgcagttatatcttcttcaagcccccagcgaagtgcctttttgtcgagcttataattcataagaagctgcgggccaactttcgacggaggaatatttttaagatcgccccacaaagtcaaaatactttgtagcgatttcgcctttatatcacttaagcatggaaaagatatcagtcggtcgactaaatacagcgccctcctcgcctggtcggaatctattgactcaccactaagctcgttcttaattaagcattcaattttaagttctccataccatatttccaaggcaagcttagtcagcaattcgacagagacggtgcttggtgggcttctgtaaaaagctctgaagagagataaaaactcgccatctgactcacaacccaggaacataatgatctccagcagtcgaactcctatttacttactataaatcactctatttttcaccacctgccgctgcggaacacagccttctcggtaggtatggcctccagccagcttatatacgtaggctatgtgccgatccgtatgatcttgtgcctcactaagcccaatcagctcttccattcgccagtcagagcttccattcaaccaaccagggctgaccagctggataccgtcaatcatatggagggcgcttccctcatgtgtcagcaagccctcaacaagggagatttctgctgtcaatagcattctacgcatcgacagcccactactggactcaagacaagagatatagaaccatgggcagtgtaaagcttgctcaacgtaccgccacgcccgagtcccctcgctagagagctgcgagagatcaaagccgcttatctcagcctgcttgtgcgttctgaacatcacgcctccgaaatgaacactatagattgtagccctaaaggacgcgagacggcttcatctctcattttgcgagatgtgcaaaatggagttgaaaacggcttttggtcgggcattgaagcaagtccgaaccacccatgatcttacccaggaagatttttccgacgtgagcagccggacgtacctaagcacgctggagagagggcttaagagccctacgcttgataaactccaagagatcgcctccgttattggtattcatccgctctcaattttggtctacacctactctcttcaatgtccggaccaaagcgtggatgagttacttgcgcgtgttcgtaaagacctttcaggcttgcgttgatccccttctggaaactggtgggatggatgagtgtgggctgacggcgctaggggtcaataaagctcgccagaaccaacgacagaagaaaagttgagtaccaacggccgccactatttagatcgagtattacgcctccctactctcgctccattagaacatctgtcgcagacgtgacggggcatgacgctgttctcgagcctggtgtgcctaacctcaagttggtgcggtcgctggcgatacagagggaggtattccagctcgaggtgatgatgtcgtccgttttgagattcgcttggtcaaaaattcgcagtcatgacgttagtaagtacgccctactcatccttactccaatctttgtaaagcctttggacttcactgcgactcaaaggaagccaatccatcttcgactgaaagggctttggggattgcctctggttgttggcggagtctgggcatcgctagtcggcttgggcctcgagtggggatatgggaattcagctggggcaggagtgccgttggccgatgcatttcagacactcagtcgcctcaagaccgtgagctcggtattggtaactgctttcactgcgttcttgctgtacggcatcagtgttcttcggtggggctaccactgcgctgcgatccagctattgagacggagatggcccgacctcagcaagcctcactgcctgtttttcgtcgtcaatacttcggcatggggtatgtgggtcgcaatctacggatttggcctatttcaagccatcaaatggtgggttaacgctgggcaacctgccttcgttccggatgcctatgatgtgaccgagccgttgttgtacgtaatgattgtatgtgccctgggcggattgctgcatctaacgacacgtaacaatactgatgggatgcgagcgctttacggaggatgccgaggcttgagctttttggtcaggctcgttggtaccctgctgctatttcttcttgggagcatcccattaatccttggctaggatctccatctccagccgcaaggagtgcctggctgcagcaaaaaggcgatctgccttagcccgcggctgcttgtaatgtgcggtaggtgcctaattgaactggcctaatgattttggacacctcaattgggcgctatgatggcgcccagccaacacttcaaaaccctgcgggaaatcgcgccgagctcagttcggtcgctccgttttcgaatcgctggaccactccgcgtcagccggaatttttgccggcagctggtggcaggcccaagtcagcaccgtgcgccaaggtggtaaagaaaccgttcgcgatgcggtccaaagccatccggaagagttccaaaaaatcgaactgaatggttgaaagtcagcgaactcattcagcgagattggttaacgcaaaaaaacacaaacgacttaaaaataatattaaagtgccatttcgatgagataattccctcggcaggaaatgttgactgaatacttacaacggcaaggaatcgagaaatgagaaggggtagagatgatcgtcatcctcacaacggcggagagcagcctagccacagcaatggcaatggcaatgccaaccaaggacaacgccgcccaggtcgtcctgggttggaagacttcaaagaaaaggggatgcctgaagtggtagacaccttttctccacctccgcgaccaggcacaggggatagtgatgggagcaacaacagaggatcttgaggatcgttggcataaaacgctgttcagcgtgtgccgctcgatccgatatcaccaacgacgtcgtgcgttttatgacaggttggataagacatccaacatgctttccttgattctgggatcagccgccatttacggtgtccttcaagaaaacgcaaaaaatgtggcgctgatcgcttccgccactgtgacagttgtttcatccatcaacttggtcgtgggcagtgcgcaacgtggccgggatcacaccgacttcatgcgcaagtatgttgaactcgaaaagcgcatgcttggcgaaccgaatgaagagctactactagaggtttcaaccgcgcggttaacgatcgaagcagaagaacctccggtgctgcacgtgttaaacagcatttgccataacgacatgctgagagcgagaggttatgcaaaaaaatacttcctcgaaatcggttggttccaatcactcctggcacagataatcgacatcaatgtaagcggtatcaaatcagtgaaagtcgagtccggcgctactccttaaactcgattaaaagtccctccaacacacgccgccaattatggcggcgtgtatatttcagcgtctggaggcgactttcatgcgacccgaagtcccccgcggcatccccagctacacctcggcaacctccgccacaccaaaggcacccgcttgaaaggcatagccacccaacaaactgatctcacttcgcccaatttaccaacccaagatggggcatacgcgctatcgtccgcgtcctcattaccaaccaagacaaacgccaatccgccgacggcagcccacagcaccgtgcgggacatcatccaacgctgggcgccgcccaacgaaaataacaccgaccctacaccgacagcgccgcacgcgccctcaacctcagccctgacaccagcacaatcgatgtctacgacatcatgcgcgcctttgtcaccgtcatcattcggcacgaaaacggcccctgccgcttaccgggcggttgctggtacggcgaacccctcatcaccgaagacttcaccctcgtaggcctggaacgtgccgtccacggctactaacagcgccgctcggtgcccccccatggacctgcaagacctcaacaccggcctgcaaatgtccatggtagggatatgtaccggggcggccatatttgccgatgaatgacgaaggacttctgcagccagaggctgaagaagcgattctcgacgtagtctaagcctatttggtaggcgcagccgaaagcgctcgtcgcatttgatacgcgcccgaaaatttaaagtgctaacgtaaatgtatatccaggatggcatttcttatataccctaattagctaggcgcattactcagaacgcgacaagccagacgaatagagcatacttctctaaagcggtgatgtcccagcgctaaataaccagcaaagctcccccatcaaaggacagtaaggcagcagattaaatggctagaatgataccagagcatggaccgcatgaaaccaacagtgctggagagcgagacttatacaccgccctaaaaaaactacctgatagttacaccgtaattcatagtctgccgtggctttgcaaggcagtacagcagctagacccaaaagccaagccgacgggtgaaatcgattttcttataattcacccagagaatggtgtattagctttagaggtaaagagcgggaagtatcatattcataactcggtcttcgtccacataaaggacaagcgtgtcattgatccgatcacacaaacaagaaaaaacattcatggccttgctgcatggctaggtgttaaaccctctttaaggctgaggattggatatggacttgtgtttcctcatagcgattttcacgcctccccagtagcgcctggactttacgatacaacggccatcccaccccagccgatatacatcgactacttgcagatgccaaacgtggcagagcgaataatcgagctaatgcaatattggaaaggcgcacttaaaaacccacgactcggagaaagtaaaacccaagagctaatcgatgcactttgtccgacggtcaatggcgaaccctcgtggagcagcaggatactttatgacaataaggtatggctaaaattaacagacgagcaaattttagctgtaaccctgatactaaagaaaaagacgtccttggttaccgggtggccaggcacgggcaaaacacttattgttatagaggcggccaggaaattatccatagatggaaagcgcgtcttagtaatttcgtttaacagtaggctgaaggatcacattaaatcccagctttcggaatatcaaggctgcactgtatatacttggcacgggctatgcgctcaagccactagagctttggaggcgccagctggttcagaggactggtatcagactacttgcttgcaacacttacaggacgccctggatgatggggttatgggggaatatgacgttctcatacttgatgaggcccaagcactcaacaagaaatggtgtgagctattatttaagtggttcaagaacaaaaccattgcgtgtttctgtgatgagacccaagtgttttctttcgagcgggacacagtctgcttagacgaattaagcgatttgctccaagtcaaaccttttgtgctcacaattgtaatcagaatgccgaaagcagtgactgaaatactggcagaagtagtaccgccaaactttcagtatcattcgccccgtgatatcgagagtgattccgccctagagatcatgacgtcagcaccccagcaagagctgaaacgcataagatatcaattaatcgaaagcggcgtaaaaccggacgatatcatcacgcttatagattcaatacaaggaaccagtcactacgaccaccttgttagagaaaaaataccatttgaggcgatcgcgagattcagaggcttggagtgccccgttgtcattgtgcttggcgccgagggagttggaaccgcagagcttttcagtgcatattcacgcgccaccaccaaatgcattgcgatctacgatatcaaaaacgtgctttgggactctgatggtggatttcaaacacgcttggaaaataattcggccagcaaaaccattattgcattagaacgttcaaagcttcgcatcagaaatattgtagagcagaatactaagacgactaggcttgccaccggaagtatagacattgcctgggctgaagactggaaggtttggctagtggagctagagaaaaatgaaacacccgtaatgctctggctggattacttgagtgatatagcccgtgacccgattatatactggataaagaatactctaacccacgcctactatattaaacttgaagattcagcaccagaagaatatggttaccatatacgcatagaaattatgttttgcccagcatgcagtcgcattaccccacacaaggattttcgaagctgggagtgcatactttgctctttggacagaaaagatagttttgaggatcttgatgtcgaccttatagaaaaaatcgaacattacgataaagtcataaccggacggattgccgacaaaaataaaattctagaatttagaagcaagttacctccaccaattgcggctgcagcctctctcttgtatgcatctcgaaacaagctcagacaaagaattctcgacgtacaattaccggaaggaaaggacatgtacagagttgcattcgcctttgcccagtcgaggattgctatatggccccgagaggagagaatggccgttaacgaggtcgccgaagaaatctataatcgatatgaatccctatcagatatttccctgaaaacctggcaaagtatttttgccaacgccatgggtacgctttactcgaaacaatatacaattaaggtagacaaaggaatctacttgcccgtcgacgactaggcggctccagtaacagccagtaacagtgacataacgttccgattcgctgttaccgaatgtgccgaagaataaaaaacttcgatagcgtcatctcggatctgtccgcctttaagtcactggttttgaccataaaggaaaacgcagcccctccaccagattatccggcataacaaaggctaagctgtaacgagctcgagttatcgcgacgtacattttgttttgcgcagtttccgatccttcagcaaacggcaccgcatgcccaagcacaaaatttatttggctctcggctggcaagatcagtacacgatcaaagcccagccccttgctgctgccaaagttgtagcatcgggcgtctggcggaagaaattttgtcctcgacctaacattccaacggagtaccattgggtcaaacgttgcgatgtagtctagcacttcggactgcttcacgatgaaagccccaagatggtgattgaactcaccaggggttgggtcagcggctgatttcgttgcctcgtacgccccctgatgaactgtatcggcgatatcgcagattggttggatactgcgcctattcagcggcagtggctcctcaatgaaccccaacgcccgaaattcggcaatcttctgggcggcggtctcaggggctttgtgcccaaaggatgtctcgtacaccgtttgcctgaagtcccccacacaggttattgaggactttataaccttgctaagactcttgagtaccgagtaatcccagcccactaggtcctgaacttcatcaaaatacactcgtgtgtagatttcgctgaggcgcactaccggtgcatttttcgtcttggaagcgatgcgggttgcaagcttcgctagtaagcccgtatgagctttcgtctcacatgaggtgaggtaatgcttagaattgtagcttttatcagccagttgctctttacgtcctagaatagcgcgcctcgttttcggattgagatgagggttactatcgttaaaaaaaattccctcaatacgcttttcaaatatagcccgctggtagggcctgatcatatcctctaggtaaaaactgaaaagccctttgaccataaatctatcactgctcctaccgaacagcttgatgaatctggcccgtaactcttgctgattactagtggtgtaggtcaccacaagcaccttcccaccgcgctcaatttcagcgatcgattcggtgatcaccttatgtgtcttccctgagcccgcaccggctatgcaaagtacattaggcaaaagagagtacctcatccaagaacggcggatacttgaactcggtgccggtatcaaacaacctaatggccgagtctactttctttttccctttaccatccccagatgtgcttttgaaccaggtcaccatgaagtcccgcttttgagcgagggaagcctcctttttgaacaggttataggtgggtgtcgatagtataatttccgcgaaggacaataaatctttctcgcttccagcgttggcagttatcatcgcgggttctagagagaaatcttcattatttgcggatgagatcagtttgatattaggatatttgagatattctttccgggcttcaacaaccttaccctgataatctccatcattatccctcagcacatttacggcagtgccaatctcctttcctatctcgataaacgtcttaaatcctactccgcgtactacaataatatctataccgtcctgttcgggcaggcgtccatggtgcttacggccatagatcttcttgagaaccagttcatcggatgggccctctaccaacactaccctcttagatagagctacacgcagcgtgtcataccctggaagacgcctcagcgtttttaccacgtctttatcgaggttatcgaggcgttggtatttatcatgaagcaggcaaattttattaatgcttagtttattcagtacatacgagctatgtgtagtgataaaaagttgctttccttcacgctgcgactcaatatcgctgacaagcatgttcagctcgatatgagaaagatgattctccggctcctccatcatcaccaaatcgatatctttggatttattatgcaatgccagcttgatctgaattttgctctgttcacccttaccaatcatatgaaatggcacgtcatcaacttcgagctgcagaccattttgaatagcaccggcaggcatcgtactagccgcaatcgatagatttttttgtgtgattctgttgtctgcgtccagatccttgttgaccgccttcacctcttgagtttcgttaaaggactgcaaggtttcacggtaattaaggttaaggcgatattcttcctctttctttaacgcagtgctgatgacatgggagatatactgatttttgccaaatgtcggatggatacgtgtagggtcaatatacagcgcacgaaactgcttggttatcggcttgataacgctccacgcaaagtccatccattcaaccttgtagaactccacgggaatactggtgatggcagcacccgaagcaaggtaatctcggtatgcatcggtgaaatccggatcgaaggtggccttgaccataaccccttgtgcgtccttcgctaggctgttgttcgtgcccttgtaatccggcacgttcttcatatacgcctcaatcaccagctctggaagatcgtcaatgcctctgggggatgctagaaatgctgaaacggcttccctattgaaaagatcgggcgagagctcattgctaaaagcccggccacggtgttgatagttcaggacaatttcaagcgcctctagaattgtgcttttgccagcgttgttatctccaacaaaaatgtttacgtcgtcgttgaactcaaacgtgtgagctttaaatttcttgaagttaattaaacgaagagattctatgagcacttcaattccctctgacgtagctaccgaatgatggcgctcggccatttacggccaaacgctacacctgtattcacacgagtgtctagtggcgaagcgacgttcaattgacgacggaggaccaccggttaccggcgtatccgaagtcgggacgctgatctggctcttggcatgcgaaggttattgccgcatgtctgggacgtgccttaagctcctttgaagtcatgttctcaatgagcggtggtgtcgaattttctgatgggctcctgtacaacattgctttcgatttaaggtgagaaaataatggcaagtatcgatgggttggcagggttggcggccctgtccgcgaaggtaaggagcgagcgtcggattctgctcgaaaggcttaaatcatttgagaaaaagctgttggaggcagcggaagggatcggatgctttgcttacagcaaatccgtgacgctatctacttgggatcatgaagagagcggcttcactggtggccaggtaggctggctgaccttcgacggcgtgaaactcacggtcagaacggaatcctactcagatagcggccaagaatcgaagtatgacgaacaggatctcgatagggttcagcccggctggttgatcttgctaagcgcaccgaaaactctcaattcactggtagtaaatatttctaaaacgctggaagaagaacacaccctgttcgcaaccgccaacgagtggctaactaaattcgtggcaatggaaaaagctttaatcgacgctgatttagaagaaaacttcgagcagcatccgagtctgcttgaatcttggcagaaagctcggaaagcagtagaaagcgatccagaggattccataactcgcagctgctcacatctagaaacagttctgaaggcgtgcctcaagcagtttggagatacgggatatgaaaccctgcccgtagacaagctcaattcccgtgttgtgaaaaagctgcgtgatgcggggatcgttgacggaggtgccctgaaatccctaacggggcttggaaccatcttccatggcatcggcaccatcagaaactccagcagcacagcccacggcaaaatcgccggttattcacctcccggagtagatgtggcgcagttcatcaaccacttggccggatgtggttccgcgtttgtgctcaagcaaacggaaagattttgaagggaaagtagtagcctactactcccacacgtggatgagtagactctgaggcctgtgaaattgagggcggccgttatgctgaaggaagagcaagccagggaattattgatcgaatgtgagcgtcttgtgggccagtctctggttcagatccgaggcaatctgaccaagtcagaaaatcgctcggctgcaattttcgagttgcttgccatccagtcattctctgcgcttggcaaggtggagtacgagccgttccccaatagcccagatattttattgaccctacctgacggcactcaagcctgggtagaggtcgcgtttctgtacgataaatactggaaacaggagcggcagtcacgcgagctgaccatgaccatgcgggaccatgcgaaagcacagggtatcgcacctgaaaaaatttccctcaggttcaatgggattgctaccactgcgggctacgatcgtcaccttcccgaactccatgaactcaaaaaatttctgaaggaagactacgtgaaggcgatctttgatcgcatccagacagatccattacagccgttcactgaagctcatcctgttttcagctttgagacgtcctatgtcccctcagccagttacgcgagcggaggcggtttggtgcaagaagcgccgaaagatgtaaggcagcaccagctgttcaaaattatcaagagaaaggccagccagcactcggtagagggctttcgcatcgtttgtgtcggcactgacaccagcagagcactgtcccgtagctccgcgccagcggtagttactgccgaccaggcagcacgcatagccttcagtgaaacgacctcggtaggctgcgttgtaaccgtagacataaagcacgtttaccagcccttcagccaactgcagaaggtcgcacacccattgatgtacgttaaccccagagctaaagcacccctgaccgaaggactggctgaagcgcttacacatcttgatttcaatcgctggaaatattcgtttgaactcaaccaataccagactccgagtaaaggactggccagaaagctattggggagcattagtgtgacgacaaagaaaaacggcatgagcctcgagatcccgtgcgctcttcttgtagaaatcttggccggacgggaaaagctccttgaaggcgagtcaggtatggatcctgcgatacagcactttctgtccggagactatcgcgtagatgattgttctctcctcccggctgacgttcaggctggagaaggtgccaagttaaagctggacttgatgctcgaccacgatgccatcttcgagcgattgtcgaaaccaaagaactcttgagcggtgcgcccaccccgatgattcgctgtcttcgatggagctccgcgcccatttgagcactaacactggctgtagcgagtggcttcagcaagatggtcacattttaggtgccgttgccttcacttccttggggtagttctgccacagctttcaaattcttggcttttttgggtgcccgtggcttggccgctttcgccttattgaattcgctgtcctttcgcactttcgctgcctgcgaggcattggagacatccagtaccaccactgacgttgtagcagctagttcggctggcagcagatctttcagtgccgccttcaacgcttcaggtttttcgggttttatgcctgctggaggcggcgttgttatcgccagcatagtattgacccagttgctgaaactttactgacccaagctcctaccttgtgaaccattactagtgctggattttcgtcgattggtgttgggtccgcgtggtatcggctactgggtcaattctgcgtcagcgccaacactccgagcgctttgatctggtcgcgagccctttcaaacgggttcaccgtgacctgatcaagtggcgtcaaacaggcaggacaggtttgctcagactgttgttcaatggcttccaaggcttcaaaaacagcgcgatagttaacgtcactggccctttgtagaaaaattgtctcgatctgggttctgcggttgagcaaccgcttggcgatggcagaagtacgtgcaacgcctttcacaggaatgaccactggggctttggctgctcgcagtcgctcggccccacggatgtgcatgtctatcgttttgcgcagccgctgtacctttggtcgaatttcgaaatcctgatcgggccgcagccccaagagctgacatatctccgaaaccgcggtttgaagatctgccctttgcttgctcctctgttgacctagttctaatcgagcgcgttcaaggttggtcagtgcctcggcttggtcggcacgcataaatgctttgagcgtaaagctttcagggcggacgaaacgagaaatgacttcttgaagctcttctaagccgaacaaggtggccagaacatcactttcgccactgcctgtgtccttggagcccaggagcgaaaactcttgaaggcggttgcgatcaatgaaacagctcgaccaactaatgctgggcgcaattttgagcttattcgttcccaagagagcaagctgaggcttggtttctcctcgtgcaatgtactgcttgaccttggtcttgcgcctggcggcttccttgatgtccccagtggtgcaaatctcgatggcttcgcagagcgatgatttaccgccaccattgggcgcgtagaaaatgtttttcagcttactgaatcgaatgaacgtgcctttatcgtcggcgccaaactccccaaagccacggaaattcttgacgcgaagataatccagcgctcccaagcccgagggtggtattcgatccagttcaggctttttatcgagcactttcttgaagcgagcagcgacacgttggtagttgcgccccaggagttgatctgacgccgtggtgatgtgtgccttgatgtggtcggagtagcggcctttgctttgcttagcctggtacatacaccagagaagcaccaggtaagcatctgtgcgcccctcaaggttctgccttgcaaaacttaaaaggtactgactcatcgcgcctcctccctagtgcacatcagcgtaaccgggctggtatcaataagccattgccaggctctctggaaggggcggagctcggaatactttgggccgtctcttacaagacaggtatgcgcccgacctgcctctcaaccccagatgcagagatattggtcccataggctgatccaagctcggtttagagggctgtatactttagaaaaattggcgctaagagacgccctcttgcgtcatcagcgccctttttgattttgccgaggaagcactatgccagtcgacgggcctttacctgggacgggtgatcaacacgacatcaatgccgatgcaacacgttgtctgatggctcgtcatcccaaggattggcggttgcaaagcctgaaaagggactgacgactactccactctcttaacatgcgttgcatattcaaaatgagctgctattcaacattcaattgccccatgatttcgatatttccttccggcaatatctttacaaagagcaggcttccatattgagatttacccgctttgcgataacccgccgattggatcaggtcgttgatgcatgtactgtgagtcaccaacaacagactcctttcgctgttcttgtgctcggccaatcgccgaatgatgtctcgcccgcaaatggtgtgtcggctggatagcagctttgcgtcacccaacatggagtgtgcggtctgaacggctcgcagcagtgggctggtaagaatatccacattttcgaggcccatattcgccctgatttgttcgccggtcttttttgcgcgctgactgccgaatacagtgattccatcggcgggtcccaagcacgggttacttgagcgatcgcagcgttcttcatgcctgatcaacaccgccaggtcgccatttttccagtcatggatcagtattaaatctgctagcccattatttttattgaggtcctggatattttcttttgcgaaactggtatacgaaaaaaacaacacggcgagcagaccaacggcagcgacaactttatgaactgtgtgacccaacatatccaacccacccttcagacttgctgataacgataagaacaccaagtctggggatcgctggacaaactgaaaatcggactgctccgataatataaaaagtactgttcgcctcgaaatttattttcagatcaatcttaaatacggcgaatacgttcaccggtaggctcgacgacgactcagtcttgacgcaccgctgcggggcaaacagcaatgacaaataagtatttacgtgtattaattttagataacgttcatgcgcaatccctacaattggaaaaaatgctcaaccgaatgggctattactgcattgccataagctcctcactcgacgaatgcgttaagttgagttttgctggatctaaaagatttgatttactactggccgctgagccgatgttaaggcaggaccaatgcccttcggcaacattcgaaaaatttggaatcaacaaccttttcgcctacagctgcccggccctcactcctgaagtgaagtgggcggtaagaggagaaggttgttatcgaaacggcatgcccgagtacgaggtgcttgaacagttcatggcccgcttgatccccgcctctggaggctttcgtcgcaccacgtgtgactggcgacttgcctgcagcgatgaatattgagctgtccggttccttgccagaacctcaatcaaattctgaggggcgtcctgtgtagggctggcaatcgtgttgcgagtaccgcagcaagaaacacgcttcctgacatcaagagtaagcccgccgtagcgtagcccatcgcggcctctgccacctggcatagactattggaaaaaaaattaggcgtgatcaggctggcgaaaaataagcccatgacgggagctcgctgggcagccacaacagaatcaatcatcgctgaaagcagcgaaaccgtagcaatacctcccaggaaaacgccgagcagaatggaaaacatgacgtgggcgaacgcgtattcccaattaatggtgaaaattaaaagcgacagcgtccccgtcagcgcaaacgaggtgatcagtacccgacgagcgccatatcttctaaatactgatgcaccatagaaggcgaacagatttccaaaggcgtacgcgctgactgccaactgaccgaattgccaagtaaagccactctcttcacggatgtggtaaagatagttatcacgaaagctggaaatgcacagactcaacaatacggtcatcgccaacaacaacatcacgcggcgagacactatcgaactggctggtggttgttgtgctgggtaggtgtccagccgctgaggcgccgttgcctcagtgagccagggttttgcgaaaacaaaaatcgctattgccatcggcaggcctgccaaaccgaacgcgataaggggctcatgccaatccgtggcgccgccgatgatagggcccagattcaccgcaattaacgcccctgcccccatgaaaaagaataccgtcgcaatcacgttggatcgatggcgcggaaagtaatggatgccaatcgtcaaaatggccagcagatttaacgcgctcccggcccccacaacgagccgcgtagcgaacatgccctggaaatcctgggcgtacgctgtccacaccgtcgccaatgaggctatcaacagcccggctatggccagccctttgcggttgacgactcgaaccagataaccggcgcctaaacttgcggcccccaagccgaactggatggcctccgatgccatttgcacttgctgctgcttgaggccgaggtcgtgtcgaatactgctggcgaatacccaaaaaatacgcctgtccatggacaccaacagacacgacaagccgagtaacgcgaacatccaaaatgctgccgagtgcttatctttcataatcagatgccgtgagttcctgatcaagttgacgccactgctgcatgatctcgcgcacgtgcgcacgggaatgtgattcgtctatcggtgttttggcgcgcagcaggcgttcaagcctttgtgcggccagcgcaatgtcgacccaccgcattgaaagtgctgcaccgtgcagacgatgggctctgtgtaacgcaagttccgattcaccttgaatcatcgcctccagtagatgaagcaagtcttcgagcatcgattcccggatctggctcaggccaaggctggtcggctctggctgctcttgtgcaacggcaacgtcacaccacaactcaatggtcgcctttaacttagccaactgaatgggcttactcagcatgccatccatatctgcttcaaagcagcgctcggcatggtcatgcccggtggacgcagagatagcgataatcgggcaacgtaggcgccgctgaccagcctcaagggcccgtaattcagtggccacggtgtagccatccttgtcgggtaagtcacagtccagcaataccaggtcgaatacctgctcttcaaattgcaacacagcctgggcagcgtcaggcgcgagtgccgcgtcgaacccaaactgatgcaactgtgccagcaacacttcctggttggcacgggcatcctccaccaccagaatgcgcagaatggcaggtaacttgcctgtccgcggttcgttaacctctgcttgagtaaagagcgcgggtacgagcggttcgcctgcggcaggcgctttagccggtgccgtcgttaattgcgcgtgtattgaaaacgccatcaccgtgccctcgcctacttcactggtgagcgacagggtgccgcccatcagctcaaccagctcccggcatatcatcaggccaagcccggtgcctccggatcgtttatacgagtgctcggcttgtgaatacggcatgaacagccgttcctggatgtgcgcagaaataccgatacccgtatcgaccactgcaatatcgagcgttttcaggtcaaaaacgtcggtactgcttacaacaaccttcacctgcaccgaaccgtattcagtgaatttaatcgcattggaaatcaggttgtgcaggatctgagtcaccctcccctgatccagcatcaagtactcagtggtgtcaggcgcttccaggcttaggccgacacccttgctctgggcacgcagtccgtagagcgcgacagcctctctcgccagtactgcgggatctacagcctcaagttccagaagcaattgctctgcatcgagccgtgacaaatccagcacatcatctaagagcgtcagcagcgtgttggcaccgctgctggccagcgaagagagatgccgctgttcatgatcgaggcgggtcagggacagcaactccacagccgccagcaccgcgttcatgggtgatcgaatttcgtggctcatcaccgcgaggaactttgccttctcacgctcactgtgcactgcccgacgacgttgccggtgggtttgatgcaccagcccgagcaatatcgccagcatcagacctgcgagaatgacttcgtgcaaatagtcttcaaggatcgacttggaaacggttgttgcgccatatcccgaggcgagtagccaatgctggtgcagatggtaggcgctctctaccgatatcgatcccaatgtcttttgcagtattgaaagcaatatagtctggtcgtcacgcacggccatgctgacctcggaattcatcgaggcgatcactccggatagctgcaacacaccctcgaatttcgagccgaagtacgggatcagataagtctcggtatcgagtactgcgtcagcatcaccctcttcaaccaatctcaaggcttccatcgccgaattgctttttatgatgctgacgttcttgaggctaccctccaatatggactcgaaaggtcccctggctgcgatcgctacccgcttgccttccagttgggccagatcaaatatcaatggtgttttagcctgcgagatcaccacggcagcactggaatggtatggatcagtcaatgcgaggccaggaatctgcaacgtcgggccgatgcttcgcatcgtggagatcaggtccactttgccctgttgcaaaagggtgattcgcgcactgccgccctctgtcagtacgtaattgaaggtgatgcctagcttgcttgagatcgcattgaggtattcggccgacagtcccgatagcttggtgccctccatgtactccagcgcaccgaatccttccaagaccgcaacgcgcagcaccggatgctcggtaatccaagcccgctcggcgtcggtcagccggagcgccgcgtccaactcatctgcctgcgcgccggagtgaaacaaggtagaaaccagtaaaaatagggcaagccaaacacgattcatggcgcgccaagggtgtctttgagtttgaacaggccgttattcgaggtcacacccagcttgcgaaatgcggcgattttttgggtgctgatcgtcttgatactgcggttgaatttttcggcaatttccgagactgtcatccccgccaggtaacagcgaataacctcctgttctcgcgcagatagcgatgccgcttgtaacgcatcattcggctcatcggcaattttgtcactactttgggtggtcgcttcggcgacgctgtacgacatctcggcgtttaaatagaccgcgccggatgcaacggcgtggatggcgcgaacaagagctggcaggtcttcccccttgccgacaaagccgcgtgctcccacgcgcaacgcaagagcaacggtggagggatcgtggtgagcagacaaaaccaggatgcggcagtcagggaattttgtgcggatagctcgaatcaatgacacgccgtcaagttcgtccggacccaaggcataatcaagcaacaacagatccggcggggcttttggcatgccagccatcagctcgcgagtagtgccgtaattgccgaccaattcaaatagcggatctttactgaggtgggcagaaagaccatgacggataatcgcgtgatcgtccaggagcgcaatgcgaaggcgtttcatagatttaccagactcgcaagacagcataggcgcgggatacgactggaggaagattagtcattttttcggctgcgtgcgtggtttttcgcgcggctcgaaccaaacctgataaatgcggttgcatcagatatctctcaccacgtctggtgcggagctaaaaggcatcggtggcacgctcgattgcctctgcgccgtcagcttgttcaaaaagtctgatacttccattggtcttgaaagtacgaagccctggccgttcgtacagcccagcctgcgcaaaagtattcggcacgactccgtttcgatgccttctgcaaccactgtcatgttcaggcgccgcgccaacgcgagtgtggtcgcaataacacgacgcgccgtaggtttggtgtccaggtcgcgaatcaacgcgccgtctatctttacttcgtcgaagggcatccgggcaatttggcgcagcgttgccgagccggaaccaaaatcgtcaagtgacaccccgaaacctcgaatcttgagcgcgttaagcgccgccgacaagcacagttcgtccatcaccgggatgtcctcggtgagttcaatcttcagcaagtgattcggcaaacccgcgcgcatcatccgatcgcccaagcgtgcggaaaaccctacggtgcacagggtatccaccgatgcattgaccgagatcggaatctccatttgcatgctttgcaaggaacacaacacctctagcaccctggcctttacaaaactgaacagcaacagatgcaggcccagtttattcaccagagggataagtaccacgggcgaaatatcaccatactcaggatgacgccagcgcaccaacgcttcggcggcaatgatctctccagtgcgcaaatcatgctgcggctggaacacaacgcgtagtccctcccccgtagcgagcgcaatgatcacgtcgtcctcactcggcacatcattcctggcatgcagcggtcgattggctatcttcggcatcgcaaaaagcgcgtgcatagcatcacatacggcctgtgcattgaaggaatacagggtggtcgcgataaagccggcggcgcacgccaactgagcatgggcatcaagcgccttgacggaaataccttcaccccgggtgggtggcgaggtacgacggggccttggagccgtatgctgctccaccagctcagtgaacggcagtaacggttctgccagccagagaattcggggagattgcaaactacacgccgacccgtagtgcatcttcaacgcgctgggcaacatcagtccgtcgttactggcaggacgaatctcggtcaccagcacatctacctgtgtttggctgagctgcaggctgagatcctgcagcccggacacaacactcagttgatggatgcccaaagagcgcaatattgataataaacgcgccgcccgagaaatatcagattccaataccgtaacgtgcaggcgatcaagttcacagggcccgcaggcaacgattgaattcacgacaattttccaggagttagcgacttgactactttaaggaatgcggaaagcccttgacataggactgggactaaaagcgagcgcccccggacctttcagcaactgtcacagcgactactgcctgggattggaattatcgcgatccgttacacttaagctggtgcgatactaaatgctttattgataaataagcgtgtagttcgccactgcactggcgctaccggcagttaccgtattgtctgtttgcaagtaccgagcggagagattgacagagaacgcgttggtgcccgcggcaggtgaaagatcgagcacccgggtctgtgacagaggctgtacggctcccgatatgctgaataactgcacaccgacacccgtcgccactcccgtgcctggcgtcaaacccaagacgccgttggcagcgttaatcgctgagtagacagggtctactcggaagctgacggtattggggacccgcgtcccgacattggtcaccgccgattgggacgctgccggtattgcgccggcactggaattaccgtaataaccggggaagcccggacaattcgtgacgtcaagcttgaagttcacctgcggtgtggctgagcctacgcctgtgaacgcagacgttttatggctccccagaggtaccgtgacgttgggtgtgttacaggtcatggcgaccacattgatgttgccagtaacgcctatttcagagatcgcggccgccgcactggtttcaacgaccgtggagtacaccaacctgccgaaatcacttccccggatagtacccgtgcctacagggccggtcttgatcaagaccagtgcgcctctagggccgagtttcaacgatccggtctggcagctattaccggcacccgtacaaccatttgggacgatccccaatgtattgcttccggctcctactgccccaggggtactttgcccagaccaccatgaaactccgatgcctggtacgccagtggcgtagacctttcctgcgtagattccaatattgaaatcaactttgctgcccaaaccattaacgctgaatacgttatacctgagcacaggcgccgggcggtcggtcgtacacgaaaaggtgacgccctcacccgcttggtggaactcttgcatataaagccgtgtaccgatggctgcatctctggggactgacaagctgccgatgttcaaggccatagtgccattgaacggacggactgcagtggcgtacccacagctggttgccgcgctgacggtttgattacagctccataggagcaaccccgctactaataaacccgatggagttgccatgttcataacgttgcctcagtgataactctaaacagaaagtaaatagactctttaaccacgcgattcatcgcacggcacttttgttggcactgctctggtccacatcggtcagtgtcgtgttgtcgaggcacatcgcattggccttatgcaactgcccctgggctttaaccgctggcactttcaacgtgcaggcctgatcgtcctggctgccccaactgacgtacagacgttgagtgccttccttgacccgagcatacaactgcccgccctgccccacggttcccgcggagttgccggcgtcatcgaccaccttggcaccaaacggtaacggactctgatccttcagccgcacattcaataacagggcgtcgcccctgaccgtggcaaaatccactgacactacggcaccggcacgtggtgctatctgtttgctggtctcgcttagttcaatcccttcatcaatgccttcagggtcgatagcgatttcattacgttgataaggctgtaaataactgacgaccgccgtacctttgccatcgagccgcaaccctggataccccactacttttgcaccggcagctccgggcgcgttgatcaccgccatggtttcaccgctataaggcgtcagggtcaccccgttggggtgagcgacaagtgtgccgctgccgcccaccgaggcactgttgtagccgtcaccctggctgaggctaccgttgattagcattttcgaaccctggtattggccgttaatcgaggtgctggtggagcgactcattccttcgcggcctgcggtcaggctgtaaccgtactcacggtcttcgcctgcgctgccactcacggttgcctgttggttgtagtaacccttgctgtcacgccccatacgcgccgacagttgcggcacgttgtcggatgaaccaaactccagcggcatgctcacggtgaacaacagtgtgttttccatatcgccaagacctgcgcggctacggctgatgttgacgccataattgatacgcccgacgtgtttgctgtagcccatctggtattgcacatcccgacccgactggttccagtagttctgagtaaagccgctcagggacagatggccccaaccgtccagggtctggtcgacggtcaacgtcagacgactgcgcggacgaccaaaagttatcgtgtcgatacccgtcttgtcggcatcccgaaagagcatcgcgttgttgaagtcgaggtaaccgctggttgagaagcgataggctgccagtgagaagttactgccagtactttgaatgtttttgctgtaggacaagcgtacgctttgcccctgctcggcacctgccgcaagttccgtgcgggcctgggtcacgtcgactgccacagcgccgatcggcgtgccgaacgccatgcctccgagcagggccgtgtacccttcactcacctgggcgcccgtgaaacctgtgagggaattggccaggccccgctgataagtgccctgcactagcctgacctgctcgtcgacgtaattactgcgggtttcccccgccgtcaggctgaaacgcgaggtacctggacgcagcaattgattcactgaggcgtagggcacgataaacctctgctcggtgccgtcagcctcctgcaccgtcacttgcaaatcgccgccatacccggtggcgtacaagtcgtcgatggcaaacgcgcccggcgacacagtggtttgcagcaacaaattgccgccctggctgatggaaacccgtgcgttagtgcgagcaatgccacgcaccaccggcgcatagccgcgctgcgcatcgggcagcatgcgatcgtcgctggcgacctcaaccccgcgataagccagggtgtcgaagatttcaccgctggtattggattcgcccacggtcaattggcttttcaagcccgtcaggtcacgctgagcgaaggtgttaatctgctgatattggccaccatccagggtctgccaactgaacgagccgttatgccgtagccgccaatcacccacgtttaacccggcattcagccccatgtaagcggaatcgtagttccctgattgggttttactgcggttggcgttgaaatcgtagccgagcattgccgaactgacaccgcgatcccacaactcagggctgacatacccacgagcgttacgccgcatggagacctgcggaatgctgaaatccaactgctgggtgtcggtggagaaaaacgccgtggcgccttcgatcgcttcactgataaccggacattggccttcctccgccagcgctgcgagcgcggttgaagacaaggtttcgacgttcacaccaatcagttccagcaaacgcatgttcacacacactctgggcttcttgccctgcttgtcggaaacgatgcggatatcctgacggccgctgagactcgaattcaccagaatgtcagcacggtattcacccgacatcaccgggttaccattctggtataactccaagtcgatcccgcttgagccaacaggtagaaaggcattgttgaactgcacctcctccgccaccgcgtgggacattaacaatgcaccacaaatcaaggtaactcgtctcccccaaattttggacagacgtgtatacgcgcagggggcgaccctgcggcaaatgcgcagatcaaaaagcgggttcataaattacctgaacaactgaatgagaaagtagctgaggcgttagctagggtgtgactggcttacggacaggaactaaggcaccgtaatcattgataccgctatattcaacttcagctccggcagcggggattgatttcaaatcaggcaacgcaaacaggtgcgtttcccccggcgctatcatcccggcctcactgaaaatattctgactgccaacaatcagcttcaagtcccctagagatacataaaacgctgtggggttgaacgcttgcagcgcgtaggttccgccggagtgtggaacaactttccattgcactgccgcaatggcttctgcaggcgtgcctggtagtttcacgggccgataaaaaattttaatccgcgagcgaaaggccatttccagaacattttggtcttcgccagttgacactttggcgggaatctccaatacgttaagccagaacactgactctttgtcacccgccaatggcgccccggtaaacatcaggcgcaaactttggcccttacccggatcgacccgcgagaccggcggagagattacgaacggtgcagacgaattacttggcgtcgacgtagggtcaccgtgatctacccaggattgaaccagtaccgggctgctaccttcgttatttatctttatcgtaacttcccgtttattctctgggtacaccactcttgtacccgtaataaccacggaagacatcgcctgggagcaactgaacatagccaccatcaggattgcatagcgaaaccaggctttttgaccacacatacacttttctcccgatactgccggcgcacctgataagttttcgggtgcgccgacaccccagcatttactgatagttgatcgagtaagtaaccgagcccacgatcgtaccggcagtagaagcgccggtagcgaagtattgaacggagtaaggcagtacagcggcgctggtggcaccggtgccggtgaacgcagtgcgtgcagtgctggcagtctgggagctttcaccggcccggattaccttgcccgcagagtcaagcaactgcaattgtacgtttcgggcggtgccggtgctgttgagaacattacgagttaccgggtcgacgcctgcgccagcttcaaaatatgcagcggcggtggtcatggtgccagtgcagcgactcaattcgatagtaaagccggtggctcctgaggattgaccggcggtcgccagcgtggcagtgctgagtctaggcaaggcaacagcggttgcagtggcagcgccgttaacagtggaagtgcacgtttgagcagtgagctcgccagtgaagttgatggtgccatcgttagcctgtgcagtcgacatggcaagcgtggaagtaagcgctgcaaaagcgagtagagtgcggttcataagttgccttttaagaataaaatcatcagttggaaaaaatgcccgaaggggccattttttattacgctgcgttgccaaacgtctcttttgccacggctcgccaaacagcaactaacccgttacaaacggttcgcccagtcgtcgacctagcaaccctcatgctatgaaagctccggctgccgatcgagcagcaattatgtgggtatgcacaattggcgtctttaggagtggtccgaaaataggcaccaaggggttgtataacggggcggcaatctcatcgaaccacgcccctgctgatgaattaacttttgtctcgcggcccgtcaactcgctaaagtggtaaacttatatacatccgaatgtgaaaacaccgctgatgtggcagacattatgaactgtgtacattggcgctccaagacttacgcgccgctgcccgtaaacgccaagggccaacgaaaaggcactgttgatttttagtggacggacctagtgcgttcgcctggcgatcgtcgatgtggacctgcaagaaagttagaagagctgatatacacactctgttaggagcctacggatgccctctcagtgcgaagacaaatctatcgaaggcaacgccggagcagtcagcgaataagctgctttcatccattcgacttcggcgtgggggggtggccgaaatagcgcttgaactcccgactgaactgcgaagcacgctcataacccacatcacaggccgcagatcaggtaagcatctcgtcaagaagcatcaacaatcgtgcctgatgtacgcgggtcgatttcaggtactgcaccggcgtggagtcggtatgaatcgccccgggtttcttagacacctccatgccttaaactgaggccaattaagagggccatgagtaaccagttccggggcaaatcacactgctcaattctgagcctgacagggactaccctatttccaaccagatccctaagcatggtttttgtgaaaatcagcatccattaccctccggagtgggaccgtgagaggtcggggagacgaggctaaggacggcagggaaaactgggtctatgaacatcaaacgatgaacaatcgcgttcatttttggcgcactaagccagcggtatttgccccatgagcgactcatgaacatcgaacatcgcccacatgttaaattatgtatcaggcggtactttaccaacactgcccaatgccactcacccaaggtctcatttgcacaaaaccccgtttctcgaatcggtatcgggtgacaggcactgtttgcccgtcacccaacgggcatggacctcgcgtgcagcgtgttaatccaccacgggcgtgcccagtgatcgcccggcgacaaaccagtccgtgggaggcacgtcctggaacagcacgatcacctcatccggcctggacgccagttgctccacgaactgctgggtaatcgccttggccaaccggactttttgttcgtcgctacgcccggcaaacagttcgatttttacgataggcatacgccctcctcacagcaccaggccgcgtggccaggtatcggaaagctgataaccctcggggtaagggtcgcttgggtccagcatcagttgagcggtaccggtaatccacgcgcggccggaaatgatcggcacgatggctgggcgtcctgccaggtcggtggcgctgtcgatgcgacagtggaattccgatccaatgatggagcgcccgataaaggtttcgcccactgccagctgacctttggcatgcagcaccgccatgcgcgccgagcagccggtgccgcaaggtgagcggtcgattttacccgggcggatgaccaccgcgtttgccgcgctggccacgccgccttcacgcgagagcggcgcggcgatctggcagaacgaaatgtggttccagtctttgttcagcgggtgggtgaaacccaattgctcgttggccgccttggtgatcttgaggccggtggcgacaaggtccgccgcctcgtcggaggtaagcgcaaaacccagctgggtggcgtcgcaaatggcaaagctgtcgccaccgtaggccgtgtcgacctggatcgagcccaacccttccacttcgatccacgcgtccagtttgtcggcgaacgaaggatggtttttcacttccacccgttgcaccttgccgtcgcggcaatgcgcggtggcttcaatgacaccgcccggtgcttcaagcactaaacgggtgatgggctcgaccatcggcacaatgccgctgtccagcagcacggtggccacgcacagcgagttggaaccggacatgggcggcacgtcggccggttccatgatgatgaagcccatttgcgcgcgcgggtctttggccggcaccagcaagttgacgtggcggaatacgccgccacgcggttcgttaagcacgaaattgcgcagcacattgtcgcgctcgataaaccgcgactgttcccacagggtatcgcccggcggcggcatgacaccgccgacgatcacatcgcccacttcgccttcggcgtggcagcctacaacgtgcacaatttttgtcgatctcacgggatgtttccctctcgattcagctggctgggtaaatagcgcgttgggcggcgcctgtgcgccgccctgcccgccttaagcttcggaccactgcgcgtaccacgcgcggaacaaggcgaactgggtttcggcgtaacggcgctgcgagtcgctcagcacgtcggtttcgtagaaatgcaaggtgtattccagatcgccgttgagcaccatcaggtacttgtaatacagcacaaggtcggtgccttcatcgaatgaagacaatacagccaacgccgcttccagctctttggcctgctggcgtgccctggcatcgcctttggcggcagccttgctcagttgcaccaggtgcagcacttcacgcggcaaggcattgccgatgccggtgatggcgccggtggcgttgcagttgacgaaaccgtgcaccacttgggtatccacgcccaccatcagagtgaccgcgtcatctttggaggtgatgaattctgccgcgtagcgcaggtctgccgcgccgccgaactccttgaagccgatgaggttcgggaactcgcgacgcaattcgaagaacaagtcggcacgcgtggcaaagccgtagtacgggctgttgtaaatcacggccggcaactgtggcgctgcattcaaaatagccgcgaaatgggctttctgcgcggtggccgaggcaccgcgcgacaatacgcgcggaatgaccatcaacccgctcgcgcccactttcgccgcatgcgccgcgtgggcaaccgcttcacgcgagttcaccgccccggtgccgacaatggtcgggatgccagccgccaccaggcgtgcaacgccttcctgacgctgggcttcggtgagcagcggccagtcgcccatggagccgcagtaaacgacggcactcatgccgatctcgatcagctcgcgggctttggccaccagcgcatcaaaatccggctggcggtccgcggtgcaaggggtcatcagggctggcatgcagccagaaaaaatgttgttgctcatgtgcgctcctacaggatgcagtgctgggttaaagggattattggatatggtatacggttgatttcgagcgtaatcccgcgtcaagcaggccggctaaccggcccgttgcatgggcttacaccacagacttgaggaactcgatcgtctcgggcttttgcgggttgccgatcacctgctccggcgtgccgatctcatgcacgatgccgttgcgaaaaaacgccacgcggtcggaaacatcccgcgcaaagcgaatctcgtgggtcaccagcaccatggtcatgccgtcttcggccagcatgcgcatggtgtccagcacctcgcccacgagctgcggatccagggccgaagtggcttcgtcaaacaacatgtagtcgggcgacatggccagggcgcgggcaatggccatgcgctgttgctggccgcccgacagcttgccggggaacaccttgagcttctcgcccaggcccacatggcgcaactgctgcaccgcaatctcctcggcttcggccttgccgagccccagcaccttgcgtggcgccagcatcacgttttccagcacggtcaggtgcgggaaggcattccactgctggaatacgatgccgaccttttgccgcaatttgttcaggtcggtgcgcttgtcatgcacctcgatgccgtccacgcggatgctgcctttgtggatgggttccaggccgttgatgcacatcagcaaggtggatttgcccgagcccgagccaccgataatggacaccacctcacccttctgcaccgtcaggctgacgcccttgaccacttcaaggtcgccaaaggatttatgaacgttgctgatctcaatcattttcctgccaccttttttccagctgtgcgcccatacgggaaatcacccagctcatgacgtagtaaatgaggcccacgatgcagagcaccagcagtggctcctgaatgcgggtcacgatgctttgggaggcgcgaagcaattcgacgatgccgatccacatgaccagcgaggtgtctttcatcaaactcagcagcaagttcaaccaccccggaaacgccacgcggctcgccagcggcatcacgatgtaacgcagatcctgccagtaactcatgcccagcgagcggctggcgcggcgcacgtttggcggcacggccaggatgccggcgcggacgatctcggtgcagtacgcggcggcgtagatgcccagcaccaggcagccgatggtgaacacgctccagttgaggccgaccatgcttttcatcgagttgaacagcacgaactgaatcagcagtggcacgcttttgaacacatccaggatcagcgccagcggcaaggtggtgcgcggcgccatggcgcgcagccaaccgaagatcacccccaccagcgtgcccacggcaatggccgcaaaggtcagctcgagggtggtccaggcaccttgcagcaggtacagcaggtcgttttgcgtcaagcttgtgttgaacatgtgtgcacccttaataacggaacaagcgccagccgacgatgcgggcaccgaccacgatggctttggcgatgaggtaatagagcgctgccgccatggcgaagaactcgaacgttctgaacgtgcgcacgttcagttcctgggtgacgccggtgaggtcgttgttgaggcccaccaccacgccggccgaggtcatcaacaccgaccagaccatctggttactcaaggggtgaaacaccacacgtaacagttgcggtaccacaatcaggcgataggcctggaaggcactcatgcccagcgagcgcgcagcgcgaatctgggtgtgcgggatggctttaaggccgccgcgaaagatttccgccaggtaccccgcgttgttaaacgtgataccaaacaccagcgcggcccatgagctgacctgaatgttgaaagagcccaggccgaaatacaggatgtagatctgaaacagcgacggcgtattgcgtgcgacagacacccacccttcagcaaaaccacgcagcaacgggttcttcatactgcgcatggccgtcagcaaaaacgccagcagcatgcccagcaccatcgccagcacggccgtctgcatcgtgacccaggcccccgctaacatgtcgggcagcgcgttgaaggcactcctccagtggaaggtgtagtcgagcatcaagggcacctcatcagactgaatcaggcttatcagatttcgtatacgttatacaaagcaatagcggtgccacttattgtgtcgcgccgccaaaatggagccaggccccgccctgcaaggggtcacgcgcgtttgcagtccgatgggttcgccgggcatcgacctgcacgctgctacattcgggaacatttttttgatgcactccccaaaatgcagcgttacgtgcctgtgcagtaaccatgcccccaacaaaaacgcccgcatcagcgggcgttcaggttcacgtgtgcacgcaaagcttagtagtacacacccggtacggtgagggattgcggttcgccacccagccacttcttgtacagctcggcataacggccgctgcgcacttgctggttgatgaacaggttcagatagtcacgcaggccaagctcgctgcgcttgaccgccagcgacacatagtcgggggtgtacggcgcgttaccggccagcttcaggcctttatatttgccggacttgatcgccgaggcgcccacggcactggtcacaatggttgcgtcgacatggccctgggaaacggccaacaaagtgtcgttctgcgactggtaggtttgcaccgttccggtgccccactccttgagggttttgcccagggcgttggcttcataggaaccggtggtagccgccagtgtgtggcccttgaggtcttcgaatttagtgatgttggtgccttcgtgggtcatcacctgcacggagaacacgaagtacggaatggtcattgccacggtttttgcgcgctccagagtatcggaggtggacgccacaatgatgtccgcgcggttggacaccagtgccggaatacggtcggggaacggcgtttcgacgatttctgcggttacacccagtacttttgccaggtcgttgcagtagtcaacgtcaaagcccaccggattattggactcgtcacgcatgcccatcggtgggaagtcgagggtgacggcgcaacgcagtttgccggaatcaataatgtcatcgagcttgtcagcctgggcggcactcatgaaaccagcggtaaggcagcccagcaaagcgatcgttaaggcggatttattcacggaaaacctcggaacgttacgtggttgggatttcgtatacggtataagcattaagcatgccgtgatttcaaatcgctggcacaccgctctgaaccgggttttccgaacggtcagccacttgcggggcgagccccgggtgttacgaaatggagcgaaaaagccttgaacgacctaaattcgggcagtttcgtgtaattgcaggtaagcacacaaaaccgtcgacagaaaaataacgagtgctatatggtatacgaaatacctttaattgcttttcgtcgccgcgcccggagctctcgccatgaacatcctcggtcacaactttattgccggtcagcgcagtgcattgggaagcacttctttgctgagctataacgcaagcaccggggaagccctgccctacacgttcttccaggccaccgaggctgaagtgcacgcagcctgcgtggcggcgcaaaacgctgcgcaggtgtttcgcgacacctccagtgccctgcgggctgacttcctcgatgccatcgcttgggaaatcgacgcgctcggcacggatttcatcgagttggtgtgcaccgaaaccgccctgcctagcgcacgtatccagggcgaacgcgggcgggtgacacatcaactaaggctgttcgcgaccgtgctgcgtcgtggcgacttttacggcgcacgcatcgacaccgcgttgccggaacgtcagccagcgccgcgaccggacctgcgccagctcaaaatcggtctgggcccggtggcggtgtttggtgcgagcaacttcccgctggcgttctccaccgctggcggcgacaccgcttcggcactggccgccggttgcccggtggtgttcaaggcacacagcggccatatgggcaccagcgaagtgatcgccgcagccatcagccgcgccgtcgaaaaattcgccctgcctgccggtgtgttcagcatgatttatggcggtggtgtcggcgcgcagttggtcaaacacccgacgatcaaggcggttggttttaccggctcgctcaaaggggggcgcgcgctgtgtgacatggcagcggcgcggcccgaaccgatcccggtgttcgccgagatgtcgagcatcaacccggtcatcatcttgccgcgtgcagccaggttgcgtggccagaagattgccgaagagctggccaactcggtggtgctgggctgcgggcagttctgcaccaatccgggcttgatcatcggcctggccagcccggcgttctccgaactgacggcggcgctcacgttgcacatggcgcaaaaaccggcgcaggcaatgctcaatgcaggcaccttcgccagctatcgcgcgggtgtggagcgactgcaaaaaagctttggtgtaacgcatctgtgcggacgcgcccaaaccgcccttgccgagccacaattgttcagtgctgatgaagagttgttgatcggcggggaagaagccttgcaagaggaagtctttggtcctgcgagcattgtggtgaccgcctccagcaccgaacgtctggttgaggcactggacaacctgcaaggccaattgactgtcacgctgctggccgaacccgaagaccttcaggactttttgcccctggtcacgctgctgcaaaccaaggctggccgcctgctcgtcaacggctaccccacgggtgtggaagtcaccgacaccatggtgcatggcggcccctaccccgccacctccgatgcacgcgggacctcggtgggcacactggcgatcgagcggttcctgcgcccggtctgctttcagaacttcccggacttcgccctgccggatgcactcaagaacgccaacccgttgaacattcagcggctggttaacggtcacttcaccgatggcgctttgcaggagcaatagcggcgcctgtaaacattcgtataacatatacgtagtcgcctgctcaggagagccaccgtgtcactatccttgtccaatgcccctaacctcggtgtagccccctcgacttcggaagtcatcgccaaatacctgcgaaacgcgatcatctcgggcgaaattgccgaggacgatccgattcgtcaggacgatatcgccaagtccttcaacgtcagcaagatcccggtgcgcgaggccctcaagcgcctggaggcagaaggtctggtcgagttccagcgcaatcgcggcgcgatggtcacacgcatcagcgaagccgaacttgctcagatttttgaggtgcgggtgctgctggaagtggaaatcacccgctacgccgttcccaatttcaccgaagaacatttcacccgcgcttatgccattctcgatgacttcctgacgggcgaagatgcgggccgttgggcggagatgaattgggcgtttcacgcgtgcatttatgaagcggcgcagcggccgttcatgttcaacctgatccgctcgatccacgacaagatcgagcgttatctgcgcatgcaaatcgtgctgtccgacggcaaggcgaccgccgatgccgagcatcgcgccatcgtcaaagcctgccaggcgagggatgtggaattggcggtcaagctgattgaagaacacatccatggcgtgtgctccacgctgttcgagcacctgcccaagtcgcggtaacggctcaaagcgcaactccttatgcattgagccgtggagattctcccttggactacttcaccgccctcaccgctttcgtcgaagctgccgaaggcaataatttctcccgcgccgccgagcggctcggtatcaaggcgtccacggtttcgcgctacgtgaaggaccttgagcaggacctgggtatcgcgctgttcaatcgttcgacccgtacgctgcatctgaccgaaggtggccaaacctttctgatgcatgcccgtcgcgtactggacgaacttgagcaagccaaggccgccacttctgcgttgaacctgcatccccgtggcttattgaaactcaacctgccaccggcatttgcccgccaccatattctccccgccttgaacgacttcctgcagcgctacccagaaatcacggttgaactggtcctggataacacccaagtgaacctgatccatgccggtgtcgatctggcgatccggattggcacgttggctgactcgacgttgaaagcgcgcaaactgtgcgacggccaataccacgtggtcgtcagcccggcgttttgtgcgctgcacccgcctgcggccaccccggcagatttggcggcgttgccggcgatagtgggtacgcacgccatgggcgacatgacgtttacgcgcgccagccaggttgcaccgctggcgtctggcagttgcattcgcatcaatgacctggacgcgcagttgcttgccgtacgccaaggcttgggcttcgccttgctgccggactggttggtggcccgcagtattgccgcgggcgacctggtggtctggctgcctgagtggcgtatccaaagcaatgagcgggcgttttccgtgtggtttgtctacccgcccaagcgcatcgtgtcgtcaaaagtccggtgctttatcgactttatcgttgagcgcctgggtgagactccggattggaaatgactcagctgaaccggatatccagcgctcgcaggtaagtttgcagccccgcatcctggatcggaatcaggaacgcctcggtgtctgattcattgaaatgtgcgtgccaataccccggcggcgtcacaaatgccaggccgggcgcccagtccacccgcaccgggttgcggatttgcccatccgcctccaactccgttccaaccagcgagtaacagcccaccgggcaatcaatgatgaaatccagagcaatcgactgatgccggtggggtttctgcacagagcctgcgggcaggattccatacatggcccacaacacatgggtcaccgtgcgcgtctgggggaagttgcggttgcccagcaggatactgatgcggctgcggtcctgtgcacggggatcgtcggccgcttcacgcagtttcgcgttggccaacgctgcggggtatagggttggcgcaaagcgatcaatgacgggcttcactcccagataacgcagcagaggttcgtcgtgcacatagtaaaggcgcgcatcctgcacggcgcgccaatgcgccgcctccaaacccggcagcgcgataaagcagcctctggaccactgaacctcatgctcgccctgcaccactgcgccctccccggcgatcacgtaaaccacctgtgacgtcgcgttgggttgcaaagtgagggcgtcacccgcgttcaggcggatgaagttcgcgcaaagcccgggccctggcgccggcccttcacagccaagggcgtcgctgaggtccagcggtacgacccgcgaaggcccactgtcgtacagcgaggcgggaaagctgtgatagggaatgcgcgagatcaggttcgcgctgatggggttggccgccttgctgtattcgaagtactcggcgtccagttgatttgcatcagtcggttcaggcttgaattcacggttcatcaggttcacctcaggcttcgtctgtggctgaactataggcattgaacttcagtggattaagccctgcccccgcacagcagttgtgccgaacggggatctgtacttttacccaaagcgcggaatatccagccccaggctctcacgcaacgtggtgccttcatagcgcgtgcggtagaccccacgcgcctgcaacaacggtatgacctcctgcgtgaaccgcttgaactgacccggatgcccaatgtagatattgaacccgtccaccgcccgcgactcgaaccagtccgccatcttctgtgcaaccgtgtccgccgtaccgacaaacgcccccggccttaattgccgtccaaactcaaccgcctggcgcaaggtaaagcctttgtcccgtgcctgatcgacaatgcgtttggcattggtgaaaaagctgctgcgtgcagcctccaggctctcctgtggaaacggtgcatcgaggtcgtactggctgaaatcatgccagccgaaattgcgcccgaattccttcagcgccaactcaaaactatggtcggcgtgatggtagtgctgctcgatttcacgggcatgctcgtcgctgtcgcccacgtagatttccgcgccgggcatcaccagcaattgctccggattgcggccatgttgtgctgcccggccctttatatcgcggtagaacgcctggccctgctcttggctggcggcgtgggtaaagatgacgtcggcggtggcggcaccgaggtcgcggccttgctccgagtcgccggcctggaagatcaccggctggccctgtggcgaacgctggatattcagcgggccgaccacggaaaaatgctcgcccttgtggttcaggctgtgtagcttgtcagggtcaagaaactggccggtggttcggtcgcgtacgaaggcgtcctcctcgtacgagttccacagcccttgcaccacctaaacgtgctctgccgcgcggccgtaacgggtgtcgtagtcgtaatgctcgtcacggctgtagttgccggcagtaccagcgtcgccactggtgaccacgttccagcccgcgcggcccttgctgatcaggtcgagtgaggccaggcgccgggccacgttgtaaggcgagttgtaggacgtcgtcagcgtgccgaccaggcccaaatgccgtgtgctcacggcgagcgccgacagcagcgtcaagggttccaggcggttcagatagtgggagggcgaacccggtgtgatgaactggctgtcgacgatgaagatgagatcgaacaacgccgcctcggcctggcgggcaatgtcgatgtaccagtccacgttgacgctggcatcggccggcaactcggggtcaagccacaggttgtggcggcccggcccgccgcagcccatcgtcaaggcaccgagtttaagctgtcttttagtcatttcgagcgtattccttggtgcgttcagggctgggttttggcgacggcaggctgcagggacgccgcgaatgaagcgtcaaacagcgatgctgcggggtaagacttgaccagcccctggctcgcgaaaaagtccaccgtcttctgcgcttgcaccggtgactgatccgtcaccggctccaccgatgtgcgtgcacgggcaaaccaggcccgcgcgatgtcggcatcggcgcgggtgcgtttggcccatgcatcggcataagcatcggtattggccgggctctggcgcgtccagtcacgggcctttttcaggcgttggagaaaatcactgatctgcgcgcgcttggtctcgaccgccttgttgctggcggcgacgaagctctgggccgggatcaagccttcagccgtcgccagcacccgcgcgccctggcgttcctgctgggtaacgtagggctcccatgtggcgatgacgtcaacggacccgccttccagcgcatgggaggcatccagtgcgctgaggtaacgcaactccagcgaatccttgggcaccccggccttgtccagcgcggtcaacagcagttgctggctccaggaacctttccagatggccgcgcgcttgcctttgaggtcggcgaggctgtggatcggggaatccttgctcaccagaatggccacgccttcaaggttttgccggctgatggcaatcaccttgatcggcgcgcccaatgcccccaggaacagcaccggcgcatcaccgagcaaacccaggtccaggctgttgctgttgagcgcttcggccactggcgaaccggcggtgaactgcttccattccagcgtatagggcaaatcatccagcacccccgccgcttccatcacggcctgggcgttgtagctctggtcaccgaccaccagcgtttgtgcactcgcggtcaggctcagcaaggcggcagccaacccggccgccagttttgtcaggtaacgcacgttcgtctccagatgccttcgcaggcatttcaagtcgatccgcgcgcgcggtctcggcattttaggtaggtggcgcacgatgaacccccgacgcccataagtaaaatactgataacgcataacgtaattctataataatgcgaactatgcatcacaaaggcgtcgccacctttgttgcacagcgcggctgacattgcgcagttccaagcaccacctacactgatttgaacctcgccgctgtcacggtccggccctgggcatgcgcacgtattgctccacgataaagtctgtcaacccgctgattaatcagagtaaatatgaaagagcagtctcgccagcgtgcttcaggatcgcatcgggtgacgcacacccgcacccttgtgcgagaactccaactgctgggtgtgctgtgtctggccctcgccggctgcaccgtcgggcctgatttcgttcgccccgatgtgccggcgaatgccgattattcgaaggaaaaactcaccaccaccgccagcgctgacatcaccacgggtggcgctgcgcagcagttgatcgccgggatggatattcccgggcaatggtgggcgctgtttcgttcgccgtcactgaacgcgctggtcgatgaagccctgcgtgccaacccggacgtggcggcagctcaagcggcattgcgccaggccaatgaattggtttacgccgaccaggcgtcgctgtttccttcggtaaacgccaacgcgtcgaaaacccgcgagaaagtctccggggcgcaaaccggattgccgacgtcgcccattcttacggtcagctccgcatcgctgagcgtttcctatgcgccagacgtgttcggtggcacgcgccggcagatcgaagcctccacccagcaagccgagtacgaacgctttcagttggaggccacctacctcaccctgaccgccaatgtggtcaacaccgcgatcagcctggcctccctgcgcgatcaggtggtagccaccgaagaaatcatccggcttcagagcggccagcttgatctgctgcaagctcagcggcggctgggtgccatcgccgacaccgacgtgctgacgcaacagaccgcactggcgcaaacccgcgccacgttgccaccgctgcaaaaacagctggcgcagacccgcaaccaattgatggcctacctcggccggtttcccaaccaggaccgtggcgaggcgtttaacctggcgtccctgcaactgccgcaaacgttgccggtcagcctgccttcagccatcgtcggccaacggccggacgtgcgttccgcgcaagcgcagttgcatgaagccagcgccaatattggcgtggccgtggccaatcaattgccccagttcagtatcaccggctccctgggctccacagcgctcagcggcacccgactgttttcttcgggcacgggtgtctggagcctcgccgggtcgatcgcacagccgatatttgacgctggcgcgctggagcatcgcaaacgcgcagccgtggccgcctacgatcaatcggcggcgctgtatcgcggcacggtgatcgccgcgtttcaggatgtcgccaacgcgctgagggcgctgcaagccgatgccgacgcgctcaaccagcaagtcgtggcggaacgctccgcgcaagccagcctggatctggtgcaggcccagttcaagctcggtgccgtggcgtacatcaacttgctgacggcccagcaaacctaccagaacaccgtggtcacccgggtcaaggcgcaggccgcgcgctacagcgacaccaccgccctcttccaggcgctgggtggcggctggtggaaccgcaccgacgtggcccccgccacccagggcaaaccggaccgcttcggcttgccgtcgtggcaagaaatcatgccggccaaacaggcggcgcgactgaactgacctattgaaacagcgagaacaccatggctgacgtcaagactgaacagagtgctccgcgcaagcgccggctgtggcggcccatgctcatcatgatcgtggtcgtgctggtgattgtcgccatcatcgccggggtgaagttcgtgcagatttcagcgctgatcgcccaatcgaaagtgcccttgcccgccgccgtggtgacggccctgaaggtcccgtttgaagcgtggcagcccaacgtctccgccgtgggttcaatcaaggcagtcaggggcgtggatgtcaccaccgaggtgggcggcatcgtgcgcaccatcggtttcaaacccgggcaagaggtgacggcgcaggcgttgctcgtgcaactgaatgccgactcggacatcgcgcaactgcactcactggaagcgacggccgaccttgcggccattgtgctcaagcgtgacaaggctcaattggcggtcaatgccgtgtcccaggctcaggtcgacaccgacaccgccgacctcaaggccaaactcgccgccgccgagcagcaacgcgcgctggtcgagaaaaagtcgattcgtgcccccttcgccgggcgcatcggcattaccggcgtcaaccccggccagtaccttaacccgggtgacaaaatcgccacgttgcagacgttcgatccgatctacatcgacttcagcgtgccgcaaacccagctggaagccatcgccatcggccaaaccgttgcagtgaccgctgacggcctgtccaatcaaaccttcaagggccgcatcagcacggtcgatacccagttcgatgccaccacgcgcaacgtcaccgtcgaagccaccgtcgaaaaccccaaacaaagcctggtgcccggcatgttcgcccgcgccgtggtgaatgccggcagcccgcaacgctacctcacggtcccgcaaacggcggtcacctacaacccctatggcaccaccgtgtttatcgcgacatcgagcaagaacgacaagggcgaggaagttctcacggcgcaacagacctttatcaaaaccggccccacccgtggcgaccaggtggcgattgttgacggcgtgaaagaaggcgacctgttgatcaccagcggccagatgaagctcaagaacggctcaccggtgaagatcgataacagcgccgcgccgctgaacgaccctgctccgactccccaagaacactaagggtgtcccatgaagcttaccgatacctttattcagcgaccggtctgggcgattgtcgtctcgttgttcatcctgattctggggttgcgctcgatcttcgaactgccggtcaaccagtggccacgcaccgaaaacaccgtggtcaccatcaccaccgcctattacggcgcggatgcgtccaccgtggcgggctttatcacccagccgcttgaatcggcgattgcccaagcccagggcatcgattacctgtcttcgaccagcatcaccggggtgtcgaccatcaccgccacgctgcgcctcaattacgatgcgagcaaggcgctcaccgagatcaatacccaggtcaactcggtcaaaaaccagttgccggcccagtcccaggaaccggtgctgaccatcgccgtaggccagaccaccgacgccatgtacctgggcttttacagcgacacgctgcccaccaacaacatcaccgattacctggtgcgcgtggtcaagcccaaactggattcactgcagggcgtgcaaaccgccgaaatcctcggcggtcgccaatttgccctgcgcgcctggatggacccggacaaactggcggcgcacaacgtcagcgcacaggacgtgtccaccgctctggcgaacaacaactacttgtccgccgtcggctcgacccgtggccagaccgtgacggtggacctgaccgccggaaccgacctgcacacggtggatgaattcaagcggctggtgatcaagcagaaaggcgatgcgctggtgtacctggaggatgtggcgaacgtcaccctcggtgccgaaagctacgacagcagcgtggcattttccggcaagcgctcggtgttcatcggcatcaaggttgcgcccacagcgaacatcctcaccgtcgccgacagcgtgcgcgaggccttccccgagctgcaatcgcaactgcccagcggcgtgcgcggcgacatcgtgtatgactccaccgagttcatcaacacctcgatctacgaggtggtgaagacgctggtggaggcgatgatcattgtgtctgtggtcatctacttgttcctcggctcgttccgcgcggtgattgtgccgctggtggcgattccgttgtcgctggtgggtacctttttcatcatgtatctattgggatactccatcaacctgctgacgttgctcgcgctggtgctggcgatcggcctggtggtggacgacgcgatcatcgtggtggaaaacgtcgaccgccatatcaaggaagaaggcaaaggcgtgctggaggccgcgctggtggcggcccgcgagttgggcgggccgatcctggcgatgaccgtggtgctgatcgccgcctatgtgcccatcggtttgcgcagtggcctcacgggcgcgctgttcaaagagttctgcttctcactggcgggcgcggtgacggtatcggccgtgattgccttgaccctctcacccatgatgacctcccggctgttcaagcccgggcaggaagaaggccgtttcgcacgcaaactggaccagtacttcgactggctgcgcaaacgctaccaccgcgtgttgtccggcgggctggacatctggccggtgctggtgacctttggcttcgtgctgttcctgttggtggctgccagtggcatgaccgccaaaagcgagctgtcgcccaccgaggaccagggcctggtgttcatgcagatcaaaggcccgcccaccgcttcgccccaacaaatggagcggattgccgaccaggccttccagatcgccaacaaggaagccgaatacgcgcaaatgttccagttgaccgggctgcccatcctcaatcagggcctgggcggcgtgctgttgaagacctggggtgaccgcacacgctcccaggcccagctgattctggacttgcagcaaaaatggaaccaggtgcccggcgccaccatcgcagcgtttccgttgccctcgttaccaggcgcacaaggcttgccggtgcagtttgtgatcaccaccaccgactcggtggaaaacctcaatgaggtcgcgcaagccgtgatggccgaggcgcaaaaacagcaactgttctggttcgccgacatggacctgaaactggacaaaccccaggcgcgcctggtggtggaccgggaaaaaatcgccgccctgggcatgacccaggctgacgtcggcgctgcgttgtctgcggcattggggggcaattatgtgaactacttttccaccgccgggcggtcctacaaagtcattccccaagtgctgcaggtggaccggctgaacccggaacaaatcctcgattactacattcgcacgccctccgggacgatgatcccggcgcgcaccgtggcgcatatcgagacctcgacgcagcccgaatcgatcaaccacttccagcaactcaactcggcgaccctctccggcgttagcggcgtggcccagggtgaactgctcgccaagctgaacaccatcctcgccaatgcagccccctcgggttacacctcggactttgccggggaatcacgccaattcattcaggaatccggcgggtttgtcgggctgttgctgttctcgattctgattgtctatctggcgctggccttccagtttgaaagcttccgcgacccggtggtgatcctgttctcggtgccaccggcactcttcggcgcgctggcgtttatcaccatgggctacgcctccatcaacgtgtacacgcaagtcgggttggtgacgttgctagggttgatcaccaaacacgggattctcatcgttcagtttgccaacgagctgcaacgcgcagggcacagcaagcgtgaagccattgaagaagcggcggccgttcgcttgcggccgatcttgatgaccaccgccgccatggtgctgggcgtggtgccgctggtatgggcgtcaggggccggcgctgccgggcggcatgacatggggctggtgatttttgccgggctgtcgattggtacgctgctgacgctgttcatggtaccggcgatgtacatgtttatcggggaaacccatcaccgggaagccgaacagccgttgccggaatatcaggtgtgaaggcatcgttgccctcgaaccctgataggttcgagggcaaccgtgcccgagcctattttttgggcggtggtactgccagcggcacggtatcagagccgtctttcgcgggctccagactgggaatggagaaccgaatacccttgtacccgatggcaaccggtgtgctgaacgcctgtcgcaaggttacgctggtcgccgatgacctcaccacagacccggtcacgcccggcacattcggggcgacctggctggccttcgcgctcatctgcgcattcacctgcgccaactcggcctgaagttgcgccactgtccttttatcggcgtcactaagcgggcctggctgcggcggcgcggcgggcgtgccgtcacccgccaatgccgcgccctggggggccggggtttgttttttactcagcgccaacagtttttcttcgattgcagccttcttctcgctcagttccaccatcgacaaggtcaacgcggagaactgcgcgttactcgcgtctgacgcggagatgactacatccaacgctcgggcaaggtacagctcggtgatcagtaccagcacggtatctgttcccgttgcccttgccgagggtggcaacgccaatgaggcggcggctttttttagtacctccaaatcagccgccgagtatcccttaaacgcatctttggcggccagataaggcacgccgtaggtttctgccgccggcaccgagtaggccacggtataggccgacttgcgtgccccgccaaacagcgcgccaaacgcactgctggcaacgttgacgcccagttcgctttcagccagggacgcaaacgtaaaacccggaaatgccaccaggctgttgattttgaccttgtcattgccttgcgtcagttccaggtcgggcgtttgccaggcggtggtttccttgcccgaactgtcggtgactttcagggtgggggtgaagtgaatgggtgacgccttgctcacgagcaagtcattcaggttgatccggtcgaaccagatcgaactgtgcacgtagtcttcggttttcagatcggtgccgctcttggcggagcgtacgatgtaaaggtcacccacgaccatgttggccctgggcggatagatcgccttgattcccaactgctcggtattctccgaccagtttttcgccacaatgccgggtttggggtgggtggcgccgcaagcggccaaccccaggcaaaacgtccccaccacacatctctggatagtatccattggtccatctcctttcatagcgctcagctcaacccgcgacgcccatgcgcagcgggcccttggcctaaacgatcaccgggcattgaacccgcagggttggaaatgaatgccgcagatggacgctggaacagcgctgccagccttgcctatttcttcttccatggaacgtaatggcagtttgactatagctgcttgcggtgacggaggtcgggcaactgatggggagctgcacgcaatggctcacggctgtaacgctgtcatccgcccgcaacaaatgcctgcctaaaatcccggccggagacccgccacgcaggtctgcactgacgccaacacaagaacaccgctccaccgattttcagcatcggcctttgaggtttatcttcgggccgtttttcaaggactggaatctacgcgcgtagatagctgtggaacacagggacccggtggtgctcggtacatactcagatcgggagtttttttgatgtccacgcttgaaagtaccccccaccccgccgctttcgcgggccgtggcgcggcggatgaaagtttggcgacgccccgcgggcgccgagagatgtaccgcgccaccctcgcctgttggctgggcacggcaatggaatatgccgactttgccctgtatggactggccgccgggttgattttcggcgacgtgtttttccccaatgtcacaccggcgatggccctgctgtcgacattcgccacctggtcggtcggttttatcgcacggcccatcggcgcgttgttcttcggctggctgggcgatcgccagggtcgcaaagtggtgatggtgtccacggtaatactgatgggcgcatccactacgctgatcggcttgatccccagctatgcctccatcggcatctgggcgccggtgtgcctggtgttgctgcgcttcacccagggttttggcgcgggtgccgagttggcggcgggcaccgtgatgctcggcgagtttgcaccggccaaacgtcgcgggctggtgtcttcggtgatcgcgctgggctccaacagcggcacgttattggcctcgctggtgtggctggccgttatacaaatggatcagcaacacctgctggattggggctggcgtattccgttcctgtgcagctcgttgattgcgctggcagccctgtggctgcggcgcaacctgcgtgaaaccccggtattcgagcaacgcaaagccgagttgcaggcccaacgggacagcagcagagccgctctgccccacacaccgccagccggtttctggaaaggcagccgcgcgttcctgaccatggtcggtctgcgtatcggcgaaaacggcccgtcctacctggcccagggttttatcgtcggctacgtggtgaaagtactgacggtcaacaagtcggtcgccacccaggcggtgttgatcgcttccctcctcggtttcctgatcatcccgctcgccggctggttgtccgaccgcttcggccgccgcgtggtgtaccgctggttttgcctgctgctgatgctctacgcatttcccgcattcatgctgctggattcacgcgacccgctcatcgtgaccgccaccatggtggtcggcatgggcttggcatccctcggcatcttcggtgtgcaagccgcctggggcgtggagatgttcggcgtgaaaaaccgctacaccaagttggcgatggccaaggaaatcggctcaatcctttccggcggtaccgccccattgattgcggcggcgctgttgtcgtggagcggccattggtggcccatcgcaacctacttcgccgccatggccggcgtcggtttcttcaccacgttcatcgcgccggaaactcgtggtcgcgacctcaacgccgtggaagacgccatctaacgcaaccccctcgcttaaaaaccagcactgccaacgcctcatagaaggcgccaacccgcacgactgtgaatccacagccgggcaaagccatgcctgaaaaacggccatttgataggagcgtcgtcatgaaaagatccaccctcgcactcgctgtaacggcaactgcgctgacccagcaggtgctggccgccggctttatcgatgacagcagcgccgccatcagcgcgcgcacgttttacctgcgcagcgataacccgaacacgcccggtgtcgatcagaacgagctgacccagggcttcaagctcgactacctgtcggggttcacccagggcaccgtggggtttggccttgacctgcaggcgatgcaggcattcaacctgtcgggcggcacccaacacccgaatgccacgacacaaaactccctcgccccggtcagctccgacggcagcccggtcgacaactggagccgcctggcgggcaatgccaaggtgcggctgtccaagaccgaatttcatgccggtggcgcgctttcccccaacctgcccatcctcgttgccaacgatggccggctgctgccgcaaacctttgaaggcgtgacgctgacgtccagggaaatcgacaacctgacgatcaacgccgggcaactggaccgctccaccgggcgcgcttcgtccaacgccacgcaattggccgtcgcaggcggcaccgaaggcagcaagttcacttacgccggtgctgactggaagctcaataaagacaccacggtgcagctgtaccgcgccaacctcagcgactactacaaccagacctttctgggcctgttgaacaccacgcaactggacggcaactcgcgcttcaaaaccgacttgcgttacttcaacagcacctctcaaggcaaaaacggccagcccggctacgtgttcaacaacaacggcggttacgccagcaagcccggcgaagtggacaacaccacctggagcgccgccttcacctactccttgggcggccacgcgttcatgctcgggcgccaacaagtatccgactcgggcggcgtggtgtacctgaaccagggcagcgtgctcggtggcgcaggtaacaacgagggcaatggcggcgcgagtgtgtatttgatcaccgacgtcatggacaactccttcattcgtgccggcgaaaacaccaactttggccagtactcctatgactttgcggcgctgggcatccccggcctgacgacctcggtgctgtacctgcatggggacaatattcgctctgcgggcggcgagcgctactcggaatgggagcgcgatgcgcgcatcgactacgtggtgcagagcggtgcgctcaaaggcttgggtgcgtccctgcgcgagggcagtttccgcagcggcattcccaacgtgggtgcggtcgatcaagcgcgggtgatcttcagctacacctacgccctcttctgaacaagggtgcgggtgatggtgtgcgccagccgccgttcatcaaactgcaataaaaccgaagggataatgtcgtttacgaaaagccggttacgcccctcgcctgcccacccttttctatttttttaacgccggggtctacgcgggtagacctttggccttgcccctctgaatcggaagcttgccttgagcagacaacacacaagccgcgccacgcgtgatgatgtcgcccgtgaagccgggacatcggtggcggtcgtcagctatgtgatcaacaacggcccccggcccgtcgccaaagccacccgccagcgtgtactggacgcgataaaagccaccggctaccgccccaacggcgtggcccaggcgctggcatcgggcaagaccaaaacctacgggctgattgtgccgaacatctccaacaccttcatcgcctcgtttgcccatgccctgcaacaagaagcgttggacaacggcctggtgattctgctgggcgactccggcgattgccgcacccgcgaactgagcctgatcaacagcctgctcagccagcgtgtcgacggcctgttctacaccagtgtcgaccgtcacccgcatatcgacctgatccaggccagcggtaccccgtttgtgatgctcgaccgcgtcgaccccgagttgcgcgtcaacatgctgcgggtggacgagcgcgccgcggccaggcaagtcaccacgcacctgctcagccatggctaccgcgacgtcggcatcatcagcggccaaccggaaatgctcaacgcccaggaccgcctcaacggttggcgcgacgcgttggccgaagccgcgattgccgaacgccccgaatggatcttccctgccagctacacccgccagggcgggtatgacgccgcccaacggatgttggccaacggccgcctaccccgcgcggtgttttgctccaacgaagcgcaagccatcggctgcgtgcgggcattgtcggaacacaagctcaaggtgcccgacgacatcgccctggtgtgcttcaacggcaccgaagcctcggcgttttgcaccccttcattgaccacggtgtgccagccggtcaaggagatggccaaggcggccatttcaatgctgctggcctgggatggcaatgtgaagttgcaggagttctcccatcgcctggtcttgggtgaatcctgcggatgcacgcctgtaaaaaccgtataagcctgaaaacaagaaggtgaaatgaagcgtttaatcattgattgcgaccccggcaacggggttgcaggggccaatgttgacgatggcctggcactggcgctggctttggcggcgcccgaactgtcgcttgagttggtcaccactgtggccggcaacacgccgagcgccgtgggttacaacgttgccaaagacttgatggcccgggtgggtcgcgagattcgcgtggtacaaggcagtactcaagcactgcaagagcccgacgcggcgtggcgtgacgcactcgacaacaacgtgcacaaacgccagctcgcgcatttgtggcaaaacgtacgcacaccgcatgcctttcagccacccaacctgcacgcggcagacgccatcggccaactgatttgcgccaaccctggcgaaatcaccctcgtcgccatagggcccttgaccaacgtcgccctggcgctgcaacgctacccgggcatggccgccgccgtcagccagatcgtgatcatgggcggcgtgtttgcccttgacgactacatcaaggacaccaacttcggcttcgaccccgaagccgcccatcaggtgctcaccagcggggcaaacatcaccctggtgccgctggatgtcaccacccaaaccctgctgacccacgccgacctcagccgcatcgcttcgccgggaacaccgctcgctgcatttatccgcgaaaccttccggccatggatcgattactcgatggccacccgcggcctggcgggctgctggattcatgatgcgctggtgatcgcctggctgctcgacgctggcgtcgccagtgcaactgactattttgtggaagtggagctgcgtgaggggcgcacgcggggtaaaacctggcgttacaagcagccgttgcggctggacgtgggaattgccgcggcggtgggcaagccggttaacgtgttgcaaaccgtcgataaccgccgactgctggggttgatagagcggtatctgggtggggtccaataacgaggtgtgcaagcacaatcactatgccttgcgcattttcctttgttgaaaatctcatagatccatttggccataacgtccggcgaaagcgtttgttccctcatacactcttcgccgcgatcttttgccaccatcgcgaggtttccagaatcagaaatttcgatgtaggggccaccaaactcttccacttcaactcccaaaggaaattcgtcatataaatccccctgctcactggcgtaggtaagaaagcattctgatatgtgttcaatcttcactacccctccgtgaatgttgtgattggcttgatgaagctgtccttaagcaactatcaaaaaacttactctcctggttcgccgtcaaaagggtcaacattggtttcaaaattaaatgccaagaagccctgccaccgcagaaaaaataaatcccgtctctctattcatacgaccttttttacactcaatcccacttaaaatccggactaataacgcaatacatcccagcagcaataaaaatatttcgaacgtgcagggtatcaagagcctgtccagaaaacgcaaaaaaaagtccgctttgaagtttttttcttgccattataaagttgcatcccgcaacttctgaaacagctcttatatgagctttatttttataatcgccacgacaaaacacctcatactcaacagtatccagcttaatatccgcaatatgggttgtcactagagacctaccacaacgctgacacctcacgccctctgcactgccctctttgaaatactccaaatggcctccacactgctcgcaggcggaaaaattattttttttcattctggcttgcctggattaaatattttaaaaaacccttgatttgataggtcagggctattaaataatggtgagttagggttcattgactcacgcggtgccactactagttttccatcaccataggcccataccaagcttgtcggcgcttttaccgggacgcccattttatttgctaaattttgcgcaaagccggtatcacacgctcccgtatcacaggatagcaaacgtatgggttgcccttcatagctcggattgttttcgatcaacctcgagacgaggcgttgatctgccaaaacagtcccattagctgtagtaatttctattttctgtgcactcccatgggctaccacatcaaaaaatccatctgcgtcaatatccaatctatttgaagcattcttaaaaaattgatcggaatcacccatgaaattgatcggcccgggagctgctttaccacttgaaaggtcgctttcttttgaaggggtaaaacttgcatcgttagcggctggtgttccgtcatcgactacatgtgttttcccggaggtaaaacccgatgcagtgtcttttgtaccgataaagctcgcgtcgttggcggctgccccgccttcacctactgcaacggtgtctccagacagtaaatcggccccaactcctttttcgcttgccatcacgccagcgtctatcgagacatctttagatgcccctatcgcgcttccaaagccaccacttagaaccgcacccgcgacttcctggttatttccttgcaccgctttgtgttgcgccaaatcatagtcgctttgattggagtcttgaaacccctggacgatctccagactttctttgctcagcccacccgtattattgtcgtaagcctgatccagcgcgtcactgcccccttttaccgcttcgtactgcgggccacattcttcaaatgaacaccctaatacggcaagccccgagtgcatgtcgctaagggttttgtatcgaaactgaacgtcgctcctacaccctgcggcgtcaggttttcggtcgcaaccggcaagatcctttacaagctgatccacttgttgatggttgagataattgaaggacgttgagcttgctgcaataccagcaccttgttgaatgttccccccaacggtttcagcggctaccaccccgactatctgcgagaacgccaccaacagttgtggattcttatccgctgccttcaccagataaggtagtaatgcttcgtttgcacccgccgccagagcccctgtttcaaatttcccaccttcagccgcgctcaacagcccacctacaaaagcatggagagcaattttttcaggaccgccgtccgcatgcccaactgtcaggtcgcccacggcgttgaaagctaaagcctctagcgttccttcagccgcgctggacaacgcatgccccaagttatctttgaggctacccccttgaatggcggtttgcgcagtcgcttgaaatgcctgctgagccgccgtgtaactcaaaaactgactggcgccaaccggggtgctcagatcgaaaccatggctggctttgccaatatcatccccggtaacaccgaaggcatcgttaagcattcctgccgtaaacccagcagttaagcctgagacggcataacccttgatggcatcgctgctgaaagtgcctttgagggttgcgcccaagtcgcccttattgctgatcgcactgtttatcgcggtgttttccatgccgacaaagacggcgtccgcaacggcactgctcaccgcaccggttgcgccgactaaagcagcacccgctcccccggtgacaacagcaagaagaatggccagaacaatttgggacccagctcccagcccagaggtgttgtacttgaacgaatcatggatttccttgaccctctgccagttcacatcgccacgggcttcagcctctttcaaccacgccagactcgggtctgccttcaccatgacgtcgatggtctgcgaaaccgttttttggtcaatttgtttaataccgatattcaatccgttcacggcgttgatgacggtctgccctttggccgtcaattcgctctgacgcagggtttcatcggtactgcctttgcctgacatcgacatccacgccaggctggtattgctcttactgtggctctcctgatgcaggtccttcaccgcctcaaacgaaatactcccgccactgttcagcgacaggttcgcgccgctatcaaacttggcgttctggtatacctggtcgccgccgctgatcaacgccagcgccccaccggtctgaatctcactccccacattccgaacatccgtcacttcatcatgctgagtcttcagcgcgccgaagccacctttcttcttcatgtcgtacagcgagtaatcactgtcttgcgcggcattcaggtccagagtgttcccggcatacaaatacgcctcatcccccgccgtcacccggctcgccgtcaacgccaggtcctgcccggcgctcagcgctacgtcgccaccggccttgaccgtggtagccacctggctgacgtggtcgtcctcgctcttgaccttcttcgaggtaaacgaggcatgggattcgtccgcagccgatgacagcgacaaatcgccgaccgccgacatcgtcacatcgcgcttggcatcgatttcactcgccaccgcgctgatgtcgcgcccggcctggattttgagatcaccaccggcgtccacgcggctgccgtactgggtcacgctgctgtccttgaacagcccgctgaccgtattgccgttctcgccctgggccgcgatcaggttgacgtcacgcccggccttgatcgtgatgtcggcgccgctgctggcgactccacccacgctgtcgacgtcgcggccggcttgcaggctcaggttgttcgcggcttcgatacgcgcggcgctgtccacagaatcggtgtgttcggtacggtagccgctgctgctgtcgtggcgggtgacgctgcgctcgttgaggatgtcgccgttggtggcggtcaggctcacgtcgcgaccggcgatgatgccgccggcggtgttgacgatggtgttgcccgccagcaggtcgaggcggttgccggcctggatcaggccgctgttggtgaggtcgttgccggcctgtgccgaaaggttgttggtggcgcgcaaggtgccgacgttgtcgaggttctggcccgcgatcaggttgacgtcgttaccggcaatcaacgcaccatccggggccaggcggttgttggcctgggccaggtacaccacgggcaccaacacggtttcgccgttcacttgctcgttttcgagccacacgatgtcgtgggtcagcgccgcaacctgggccgacgtcaggctcacgccgacgctgaggccgagctgttctttgctgctgatggcgttgtccatcaggtacttgagcatgcccgaatcggtattctgcccgtcgatgaagcgttgcccggtacgggcgaccacggcctggtcgaccaggcgttgctcgtacaggccgtcgccgaggcgcttggcgctgtcgtcggggttgtagccgagaccggcgagcaggtagtccgaactcatgaactgcttgaggtcggtgagtgccgggttggtttcgatcaggtacttctgcggctgcgacaccgcctttgcgtcaggcaggccatgcacgcgggcgatgctttggctggccgtgttgaccggttgggcaggctgcaacaccggcaggacagggggcggcgcactggcgttaccagccgccacttgggtggcatcggttgcgctgctgcggcccggggtttgaaggctgacggcgccgccatcggcgagggtgcccactgcgctgccactggcaacaatgccgctggcctggcgggtcgccaggttcagtggaaggttgtccgcagcggtttgggccaccgcactcacctgtatcacccggcctgtgttggcgggcgcgctgatctggtgcgcgtcaagttgcaggctggcgccactcaccgaccaacccggcgcctggttgccctgcgtcgcaacactgccggcctgcccgctcaggcggaacaggccgttttgcccggtgggcaggctgaagcccggcaatgtcagggggttgatctgctgttgagcgaggttgggcggcagttgcccgttgaccgtgatgcgtgtggagaaggtacccgcaccactggcacccgccgcccccgtaccggtcttggcgcccgcgcctacataggtaaagcccgggcggaccacgctgttatcgatgttggcctgagccttgatgttgaccgcgccgcccgcctggatcaccccggcgtaggtctggtcgccggtgctgatctgggtgacacggcgcaacacggtgcgctcttgctcggtcgtgccgataaacccggccatggcgccggccaggccgctcaagtcactggcgttgtaggccgcgccgccttcggagtaacggttgttgaacgccgccgcagcgtcgtaccacatctcggggtgccgggtacgctcggacacgaacaggcgccaggtctcggtttcaccggtttccacgccgctgttgatcaagttgttggcggtgacgctgaggttgccgcccgcgcccagggtgctgctggcattcgtcacgtcaccgccggcaatgctcaggttttgccctgcggtgatgctggaggcggcgctggaggcggtcacctcaagcttttcacgctggtcgatttgccacaggtggttctgcttgccactgcaatcgcccgcgtaattagggccttcaatacacgggaactcagtgatggacgcggtgtagataccacccgcgctggtggtcagcactgcacgcacgttctggagggtgctggcggccaggctcatgttgccgtcgctttgcaggctcgacgaactgttgaggatgcccgtggcgcggccgcccaggccgtcgcggtcgatgctcaggttgcccaggctgtagacgtccgcgtagctgttggtcagcgtgtcgacgcgcaggctcatgtcgccgccgctgaagatcaagccatggtcattgagcagtgcgccggtggtggcggtaagtttctggccgctgcccagggtggccgtgttgttgatcgtggcggcgttgatgatcaggtcgttggccgaggtcaggcgcccggcgttgttcagggcgccggtgatgttggcggtggtcaggccgccgccggccacgctggcaccgctgctcaggttcagttgcgcggcgccaaggctcaggtcgccctgactggtgatgcgccctgcaccgttgagcgtgccgcccaagtgcacatcaaggctgccgtcactggcgatcaggccgctggtggtccagttgccaccggtgccggtcaacacgctgctggccagtaactggccgtcggcggtctggttgagggtgttgacgttgacggtaagccgcccggcctggatcacgctgctgttggtccaagtgtcctgagcgatggtcaggccaccgcgggtcaccaggctgccgcccacactgttgaggttgctcggcgcaatgctgaagttgccgttgccgacgtgcagcacgctgccaccgacgttttgcaggctgccggcgcccagaatcaggttgctgttggcggtttcgagcacaccgttagtgttgtccagcaagccgccgatggcgaactcggtggtgcccgtattgcccagcgcgcgcaagcggccgccaccgttgtcgacactggtggcgcggacattgagcgtggtttggctttcgacgatgcccaggcgattgttcagcgcgccgcgcaggctcaggtcgatctgctggccggcgacttgcccgtcgttgtcgccgctgttgtcaaaatcgttggcactgacgctcaccaagcccttggcgtagagcccgccattacggttgtcgaaattgccggtggtgacctgtgcatcaccgctttgcgcagagacgcgccccccgtagttatcgatcatcgccgccagcaggttgacgcgctggccttgcaggataccgccctggcgattgttgttgaggtcgtagccgttgcgcagcacgcccatcacctgggcctgcaacgcgccgttgaggctggcgagtgtgccgccacggttgtcggcgttgttggcgttgagcgccaggtcgccggtttgcgcgatgagtttgccgctgctgttgtccacgtcgccgctgatgttcagggccaggccgttctggccctgcaccacaccgtggctgttggccaacgtcgcggcctgtaactgcacgtcagcgccctggctgtagatcaaaccgtcagcgttgttttgcacgctgccggtggcgttgatcgctacgctacccgtgcccgcaagggtgccatggctgctgttgtcgatcgcgccggcaaacaggctcagcaggttctggctgacaatctgcccgccctggttgctgacctgatcagcgcgctgcaacagcaacgggcctgcgctggccagtttgccgttggtattgatcaggtcgcccaacaggttcagggtcaccgcgccgttaccggccagggtgcccgctgcattgctcaggtcgctggcattcaccgccagtgcctgttgcgcgttgactgtgccggcgtcgttgctcagggtggttgcctgcacgtccagcgccgcgccgctgtcgatcaaaccaccactgctgttattgagcaggccgttaaccgtgaggccctgccctgcggcgctggacaggatcccgccgctgctgttgtccaggctggcggcatgaatatccaggcgcccctggctgaccaacgcacccgcgccactgttgagcagcgcgccgctgaggtctaccgcaatcgcgccgctgcggctggaaaacgtaccgttgttgcggttgtcgaggttggcgccgctcaggctgaggttctgccagccggacaccaggcccttggcgttgatcaggttcgccgcgcccagcgtgagtgcctggctgctgatcagtttgccggcgctgttgtccagcgcgcgtgcagccagcgtcaggttctgctggctggagatttcaccgctctggttgttgaggtcgcgcaggtggttgatggccagcgggcctttgccaaggatcaggccgctgtggttatccaggtcgccgttgttcaggtccaggatcacgcgttgctcaccggtcacccggccgttggccgaggtcagcgcgccggtactcaggtccagcgtgcccagcgccgacacttcaccgccgctgccggtattcaggctgccggccgtgaggttcaggttgccctggctgtggatcaggccaaggcctgtgttgttgagcaggccgtcgctgctcagttgcaggtcgccccggctgttgaaggtgccgtcgcggttgtccgccgaagcggcgtgggcattgaggccggcagcgccgatcaagcctttgatgtttgtcagggcctggctgacgcgcaagaccagcccttggttactcagcagcttgccgttgctgttgtccaggttgcgcgccgccagcgtgaacgcctggccgctggagatttcaccgttctgatcagtgacgtcggtgaggtggttcagttgcagagaacccgccgaattgatcaggccactgctgttgtccaaaaggccattgttgacgtcgagcgtcagcgcgccattgctgaatagcttgccgccttgctggctcaggccggtcacgcttgcgctcagcgcgttgttactgccaatgctgccgccgttgttcaactggcctgcgatgaggctcaacgtgtcgccgccgctgatgctgccgtgctggtttgtcaggtcgcccgtggccaacgccaccgcgcctttgccgctgatactgccgtgcccgttatccagcccggcgctgtgcagggtcagggcgccgtcggtcaccagttcgccgccgaggttattgacctggccaccgagccccagcgtaaggtcttttgcgctggaaatactgccctgtgcattgacaaggttggcggcgtcgagggtcaactggctttcgctgctcaacaggccctgggtgttgttcacatccccggtgaggttcagcaccagcggttgctggctgaacacctggccgccgctgttatccagcgttgagccagtgagcgtcacgcgctggccgttgagctgtccgagggtgcggttcagtaactggtcgacggcaaggttcaaggcattggcggcgaacagcttgccgccgtcgctgttgtccagttgttggccgttgacgttgacatcggcgctgccggtcaactcgcccgcacggttgtcggtgctgcccacggcaaggttcagcgcgtttgtcgcgccgaccaggcccgtgcggttatccaggctcgtaccgcgcaggcgcaaggtatcggtgctgaccaactggcctttctggttgttgatcactccggcattgagtgtggtgtcggctttgccggcgacctgccccgcgcggttgtccaggttggcagtggtgagcagcagcgagccatcaccgaccaggctgccgcgctggtttgtcagcccgtccccggcagtaatgtccacggctccatggctgctgatgatgccgtcggtgttatccagctgcacgctgcgtgtggtcaaacccacggcgctgatatggccattgacgttgcccagttgctggtccgccgtcaggctcagggccccattgctgatgagtttgccgttgctgttgtccagggtgcgcgccgccagcgcaaacgcattctggctggagatttcaccgccgttgttgctgaggttgcccaggccgctgagcaacaggatcggcgcgttgatcaagccgatgttgctcaggtcaccgccattgaggttcaggttgagccgggtgttgctgaacagttggccgttttgttggtcgagcccggtgacgctggcgctcagcatatcggcgctggcgatacgcccaccgttggtgacctgggttgcgctcaggtcgagcttgccggtgctggtgagctgcccgcccgtggcattattgaactggccggtggcgatgctctctgcgccgtcacttttgatcaggccttgcccgctgttgtcgaggttggcgctgttgagcgtcaagccttgcgccgagtcgaaggtgccgcccaggttgagcaggctgccggcgctggtcacgctgagcatgcccgcgctggacaccttgccgccggtgttgtcgatgcgttggccgagtaacgtcaggtcgccttcactgctgagcgtgccgccgatgtcggtcaggctgcccgccagttgcatcgccagtgtgtgttgggccgcgacgctgccctgggtgttgtccaggttcgtgccgaccaggtgtgtgtcttgcgcaaacaccagacctttggcctggttgatcacctggtctaccgccagttccagtgcagtcgcggcaagcagcttgccgccgctgttatccagatactgcccggtgagggaaacgctctgctggctggaaatttccccggcacggttatcggcgctgccgacattcagtttcagcgcttttgtagccgccacgagcccgccgttgctgttgtcgagcgtgctggcattcagcgtcaggttgccctgcgccaccagctcaccgccctgctgagtcagcgcgcccgacgttgcatcgaggtcgccctggctggcaatacggcccttgtcattgctgatgctatcgaaagccagatgcaacgggccggtggcgctggccaagccgttgccgttgtccagcgactggccgacaaatgccagtgcctgcttgctgttgatcacgccctgacggttgtcgacctggcctgtgtgcaggctcaggttctggttggcgcgtatcgctgcggcacggttgtccaggctggcggactgaatgtccagcgcgcccttggcctgaacgctgccttgcccatggttgtcgaacaggccaccaacggtggcactcaagctgccatcgctgaccaggctgccagacaggctgttatcaaggctggcggatttgacctgcaagcgttggccggcgcccaaggtaccgccctgattgccgagtgccccgcttatattcagatcaaggctgctgtcgcccagcacccggccgccgcggttgctcagcatcgccgcactgaccacatcggcaccggcgctggacacctcgccgttgtcgttggtcaggttgccggccacggccagccccaggtccgtcgagctgctcagcaaaccgtgggtgttgtccagcgtccccagttgcgccttgagcccggccgcggaaatttcgccattgaggttgctcagcaactgcgcaaccgtgagggtgagtgcttgctcgctgatcagcttgccgccgctgttgtccaggttctgcgccgcgaaggtgaaggcctgcgcgctggagatttcgccgccgctgttgcttaccgtggcgagattgttgagcagcagtgcgcccggtgtgttgatcaggccaccggcgttgttcaattgcgcgtggttcaagtccagcgtcaggccggtggcgctgtacaactggccgcccaggttgctgaccgtgctctggctggcgagcgcccaggggccggcactgctgatgcgcccgccgtcgtttatcaggctgcccgtttgcgcgttgaagctggcgtcgctgcgcaccacaccctgtgcgttattgagctgatcgtgcagccgcaaggccaggctgcttttggcgtagacactgccctggccgctgttgtccaggctgcccgcactcagatccagggcttggccggcggccagggcaccttggcggttatccagcacacccgcgcccaccaggctcaggtttgtgtcgccctgtacccggccgaggcggttatccagggcccccacggtgaccgacacggtgtgcgccagaatcttcccgttgcggttatccaacccaccgtcaacctgtacagccagcccgtccgtggcgctgagggtgccgccggcattgccaaggctggcagcgccaacctgtagaccattggctgaaatcaacccggcgccgttgttcagcacctgggcaatctgcagcgccagcgcctgatcgctgagcaacttgccggcgctgttgtccaggctgttggcggcgagcgaaaagccgtgcgcgctggacatttcgccctgttggttgttgaccgtattgaggccactgaaggccaactggccgctcgcattgatgagcccgccacggttgtccagcgaaccctgattgaggttcaggctgatgtcacccgtgctgatgatccggccttgagtctggtttatcagttggttggcattcacctgcgcctggcgctgggcactcaacgtaccttggctgttgaccagcgcagccgcattcacggtcaggtcacggctggcgatgacactgtggccggtgttgtcgagggtttgcgcgctcaggcgcacatcccccgtggcattgcggctgttatccgcattcacgcccgcttcgatgatggcgctgttgctcaggcgagcgccgctgtccagggtaatgcggtcgcgggccgccaggttaccggtggtgttgaggtcagcctgggtcttgatcgccaggtccgtgccggcgtacacggcgcccccggtttgcgcgctctgggccgttacggtcaacgcactgccggccgaggtttggccaaggttcacatggccgttggcatcgatccggatatcgcccccggcaaccatgttgcccgcaagcttgacccccacgccggcttcggtgcctaccagccggatcgtgccggcgtacatcccgcccagggcggaagagtcgatggccagttccggtgcaacactggcgtctgctgcccgcgcggtggcgttcagggtgctggcatcgacgtcgttgcgcccggccacgatgctgagcttttgcgcctggatctgcgcgttgatgtgcgcggcgcgggtaatgatttcaaactcgccaacgttgctggcgttcaagccgtcgccatcaaccgagacactgccctggtccacctgatagcggctgaccttgccgttttcaagcaccgcttgccctgtggtcagcgtggcctggggcgtgttgataaagccgcaaccgttgcagctcacgccataggggttggccacaatcacatgggcggcctgcccggccacttcggtgtagccgcgcaactggctcgggctgccaccgttgacttcgttgaggatggtgctggcggcctgcccgttgaaatttgggttgccgacaatgatcccgcccaattgtgtgctctgggtgcggtcggtgacgttgttgaggatcagccccgccgcaccgacgttgtaatcatggaactggttatgggacaggcccgccgcattcggcgcggcgatgttgacgatgggcacaccgttgcccgcttgcgccagggaggtgccgggggcattcaccacaatgccgtccgcctgggccagcaacggctgccagaacagtgcgttggccagaatcagcgccagcccgcgcttgggcagtccgaggaacgtccggcggtttttcagcgctgcagaaggttgacgcgcaagaaaggcgaactggcggacgtccatgtgaggtctcgatgcacgaaggcgaaaaagttagaggaagaaatccaggcgcaagtaaatcggcgcctcacgctcggtgatggcgtccggtcgttccagggagtgggcaaaggtcacggtggcggcgacgtgttggccacgggcaaacacctccaacgcgtcactggacatgcgcccgtgctggtccgggttgtagcgcccgtggctgatcacacccctgtcgtaaccgaggctgctgccgtactcggcgaaaacgctgtgcatccagttccaggtgacagggcgggtccagcgcaagtcattgcgccagtagccgccgctgtcaccggtgagggtctggtcctggtagccacgaatcgacgattgcccgccaaggctggtgcgctgtgggctgaacagcacgtcttcactgtgctgaccggtcatcaggctgctgaagctgaacgattcgtcccacagcttgaacggctgcagatagctgagcgttgcggtgtatttgcggtaacgcgcgtcgggctggccagctttaacgtcgcgattgctttgggcatcgaaagcgccgatgccgtcctgcatgcccaggtcgatgttgagaaacgccccgccgatgcgtcggccgtggttgatgccgaattgggcttcgctgatgcggttgctgctcaaggccagcttgctgtcttcgatgtagttgtgggtgctgaggtaggacacgccggtgctgagcgaggttttgctcaacgcgtcgcggtagatcacacgctcaaggcgcaactgatggttttggctgtcgccgctttgcttgaagctgaaaccgttggcctgggcctgagagcggtactcgctttcgctgtagctgtaagtgaggttccaccagccgaacggcaggttgtagttgagcatcgcgttgcgcgaattcttggtggtatcgctgaccacatcgtgcccggcgcgcagggaaagttggtcggccagacccagcgggttgtcccagtcaaagctagtgcccgcttgttgccggccggtgctgcgctggccgtcgttgctgtaggacaaaccggcacgccagggcttttgcggggtgttcttgaccaacacttcactgccgcccaccgccgtgcccggcgccagttccatttgtgcctggtttgatggcaagcgatggagctggtcaaccatctgctctatttcccgcaggttgagcaactcacccggtttgccgggaaatacctgcgccagttggcgctcggaaaagccactgccctcggcgcccttcaagccttcaagccggccttccaccacttgaatcttcaaggtgccgctggacaggtcttgttgcggcaaataggcgcggctggtgaccaaacctttttcgatgtaacgctcggtgatgactttgagcagcgcattgagctgcgccacacccagacattgcccggtataaggcgccagcatctgagcgcgctcattggcgccaagtgcttgcgcgccattgagttcgagggtcttgatcgggaaacaacggttatccgcgccagtgctcggggcttgcgacggtgcggcgttgccaggcaggtccttgaggtcgtccaggcgtttgcgttgttcttgaaggaggcggtcctggcggtcgcgaatcaggtcggtatcacccgggctgggagccgcctgagcggtgaaggcagccgcgaggcttgccagtaccagcgcacggcaactcacggtcaagattgaaacgcgcatggccactccattgactaaatggcttagtgccatcattgggcggcgatactattgacacaattttttggcgtcaatttgtcaaacatgaaacatttacaagatgtttcatgttttaaatctggttaaaacattcgaattggtttaatagcgcgcacgaatttcgagcggtgcattcacgcagtgtgaacccaaggtccatgtgcctgacgcatgcatcatgctcaaacgtcataatccccggcccatctgcgtggtaatctcgcgccaccacgaatagacattgatcgtcacaagacgatgaccagagccaggaaagaacatgccgaaaatctctcactcagcgttgcgccgcaacttccgtgaactgcttgcaaagcccatctgcgtagaaaccgcctccgttttcgaccccatgtccgcgcgcatcgccgccgacctgggctttgaagtcggcatcctgggtggttccgtcgcctccttgcaggtactcgcggcccccgactttgcgctgattaccttgagtgagtttgtcgagcaggccacccgtatcggccgcgtcgcccagttgcccttcattgccgatgccgaccacggctacggcaacgcgctcaacgtgatgcggaccgtcgaagaacttgaacgcgccggggtcgccgcgctgacgattgaagacacgctgctgcccgctcaatttgggcgtaaatccaccgacctgatctccatcgaagaaggcatcggcaaggtcaaggcggccctcgaagcgcgggtggatccagagctgtcgatcattgcccgcaccaatgccggcgtgctgcccaccgaagaagtgatcgaacgcacaaaggcctatgaaaaagccggtgccgacggtatctgcatggtcggcgtcaaggacttcgaccacctcgagcagattgccgaaaacctcaccgtgccattgatgctggtgacgtacggcaacccgaaactcaacgacagcgagcgcctggccaaactcggcgtgcgcattgtggtggccggccatggcgcctactttgcgtcgatcaaggccacttacgacagcctgcgcgcccaacgcaaactgacccacagcacctccaacctcggtgctacggaactgacgcacacctacacgcggcctgaaaactacgtggcctgggctgaagagttcatggacgtcaaagagtaagcagtcctcgctgcattccccctgcaactctgcgagttgcagggttgggttaccccggcccgccccgtcgcacatccctcgatctatcgatattccccaaagatatttaaataatatttcttatagctatagagtcttcctcacgcttaggaaagcctcgcgcgcctgactccagccgccgtgacatctcgctgtcgccagcacggaccctcaccccatttccccgtcgagttcaccatgaaaggcatccaccttcgctcgctgtccgtcaccttgggttgcgccgcgctgctcagcgctttatctacctcatcggccatggccggtttgctggagaaaggccgcagtaacgggctggtggcgggcatcgccaatgaacagccttatgcgtacatcggcaccgacggcaaggttaccggggctaacgtcgaagtgctgcaagccattctgaagcccctgggcatcaccaaaatcgaaaccccgatcaccgacttcggctccctggtgccgggccttgccgccggccggttcgacctgatcggcgcaggcctgttcatcaaccccagccgttgcaaagtgatcggctattccaaccccgtcacccactccggcggtgcatttatcgtcaaggccggcaacccgctgaaactgcacagcctcaaggacgtggccgccaatgccaaggtgcgcctggcgacgcaaaccgggaccaatcaggttcaggaagccaaggacagcggcatcgccgcaggcaatgtgatcctgttcgacaaagacaccgaagccctcgcggccctcgaagccaaccgcgttgacgtggtgtatttcccggacgccgaaatcatcagcctggtgaaaaaagccaacagcaccgacatcgaacgggccctgccctttgagcaaatccccgacgcccaaggcaagccgacctggaattaccacgcctacggcctgccgaaaaacgaccccgaattcacccaggccttcaacgaacaactcgccaagctgcgcgcctccggtgagctgctgaagatcctgcagaaatacggctacaccgaaaatgaactgccgcaagcgggtgtgaccgccgcccaacgctgcgcactctgagggccagccctttcaaggtctttgaaaaaccgatcctatctgaatggctgatcggcctcacaccgttgcctgccggcacgccttgaacccgcgcccggcgagcggcctaaacccacacgagtaaggccatgtttatcgatcccgcaacgctggatagcgcagcgttcgtcgcgcgccagttggcccatggtgcgctgaccaccttgcacatcaccgttctcgccgagctggtggtgctggtgctgtcgttcgtgatcgcgctgatgcgcctgtcgccttcacgcacgctgcgctggatcgccacgctgtatgtcgaagtgctgcgcggcatctcggcgctggtgctgctgttctacctgtttttcatcctgccgctgtttggcgtcagcctgtcgccgatgaccaccggcgtgctcggcttgggcctgacgttttccgcgtatggctcggagatcgtgcgttcggcactggtcaacgtcagccggggccagcgggacgcagttcgcgccctcgactttggccctgtcaccgcctttcggcgcatcctgctgccgcaagcgttgccgttcatgctgccgccgttgggcaaccaactggtggagttgatgaaaaccacctcgctggtgtcgctgattaccttgagcgacctgacatttgccggcggccaactggtcaccacgttgggccagcagaccctgatctggagcatcgtactggtgtgctatttcgtgatggcctggccgttgagctggctggtcaaacgctacgagcggcacgtcaccgcctggcgtcaggagccaggcacatgaattttgattacgccttcgcctggtccatcctgcccgaccttgttcgcggtttgctggtcaccttccaagtggtggtgctgggctttttgctcgccgtgctgctgggcctggtgctggccatcgcacaacgctcgcgcgtcggcctcgtgcacgcggccagcagcgcctacctgagcttctttcgaaatacaccgctgatggtgcagttgtatgtgctgttttttgcctttccgttgctgggcatcacgctcccggcgatctccaccggcgtgatcgggctgggcctgtattacggggcctacattgccgaggcctatcgcggcgccatcgacggcgtgcctgcgggccagtgggaagccgccagggccctggacttcgacacggttaccacctggcgccgcatcgtgctgccccaggcgttgaagccgatgctgccgattctcggcaattacttgatcggcatgttcaaggaaaccccgttgctcgccgtgatcaccattccggagctgttccaggccgccaagcagattgcgggcatgacctaccgctacaacgagccctacaccgtcatggccttgatgttcctggcgatcagcgtgcccacttcactgtttttcaactacctcgaaaggcgccgccatgactgatctctcccaccccttcagcctggcgccggcacagatccagctcacgcaagtggtcaaggattttggccgcacgcgggtgatcgaccacctcgacctgagcatccctcaaggccagaaagtcgcgttgatcgggccaagcggctccggtaaatccaccgtgttgcgcttgatcaaggggctcgaaacctaccagcacggcacgatcgaagtcgcaggtgccgccgtgcccgacacgcaacgacgctggtattggccgggcgcacacagaaggccggtggtgcatcgcgtcggcatggtgttccagcagttcaacctgttcccgcacctgacggtgcgtgaaaacatcaccgaggcgccgctcagggtagtcaagctctcgggtgacgaggccaacgcccgcgccgaccaatacctgagcctggtgggcttgagccacaaggccgatgcctatcccggccagctttccggtggccagcaacagcgcgtagcgattgcccgcgccctggccatgcgcccgcaggtgatgctgttcgatgaagtcacctcggccctggacccggagctggtcggcgaggtgctggcggtgattcgcgccattgcccacgaacagcaaatgaccatgctgctggtgacccacgaaatgaagttcgcccaagacatcgccgaccgcgtgttattcatggaagccggaaagatcgtcgccgacggctcgccgcagcagattctggtgaaccccgacaacgagcgcacccggcgctttctcaaccgggtggagcaacgctagcggaaaaaccggttggcaggccgtggcagcccgaggttttcgcgcaacgtgctgccctcatactcacggcggaaaatcccgcgccgttgcaactccggcaccactttatccgcgaagtcatccagcccgcccggcagccacgggaacatgatgttgaagccatcactgccctcggtgtccagccactgttgcatctcatcggcgatgctttgcgctgtaccgacaaacgacaagccggcgtagccacccaggcgctgggccagttggcgcacggtcagttgctcgcggtcggccagggccagcacgcgctcacgggaactctggctgtcgttggtttcagggatcgccggtagaaacttgtcggggtcgaatttcgacgcatccgtgcccagggccaccgacagcgaagcgattgcgctttgctcatgcaccaggctgtcgaggtgcgcgcggatacgcttggcgtcttcccgcgtgtcccccaccaccacaaacgcaccgggcaaaatcttcaagtgttcagggttgcgcccgatcaggcgcatacggcgtttgatgtcggcgtagaaggttctgccctcctccagcgtgcccggtgcgacaaagatgacttcagcggtttcggcagccagttgccgcccgggctcggaagctccggcctgcacgattaccggccagccctgcaccgggcgtgcgatgtgcagcgggccgcgcacgttcaggtagcggccctgatggtccagggtatgcagcttgtcgggatcaaagtacacgccgctgtcggcatcgcgaataaaagcgtcgtccgcccagctgtcccacagccccgtgaccacctcgtaaaactcgcgggcacgggcataacgctcgtcatgggcgtacgcctgcttgaggccaaagttcaacgcggcatccgggttggcggtggtgacgacgttccagccggcgcggccgttgctcaagtgatccagcgaggcgaagcggcgggcgatatgaaacggctcgtcgtaagtggtcgaggccgtggcgatcagcccgatgtgctcggtggcctggctgagtgcggacaacagcgtgaacggctcgaacgacgtcgccgtatggctgcgtttcagcgcctcgacgggcatgttcaacaatgccaggtggtccgccatgaaaaacgcgtcgaagcgcgcccgctcaagcgtttgcgcaaaccgcttgaggtgagtgaagttgaaattggcgtcgcgaaatgcgcctggataccgccaggcaccggtgtggatgctggccggacgcataaaggcgccgagcttgagttgacgttgagcggtcatggggcactcccggaagatgactgccgagcatcgaccgggcgcccatggcctgtccaataatcaaacgtactggcttatacccgtcagcttgttgatgtcctgacggggcggcaggccgaacatccgcgcgtagtcacggctgaactgtgaggcgctggcgtaaccgacggcgtaggccgtggcttcggctgatacccgctcggtgatcatcagccgccgcgcctccatcaagcgcacttttttctgatagtccagcggcgtcatgccggtcagtgccttgaagctgcgatggaaggccgaaatactcatgccggccatgtccgccagcgcctccagggattggctctgggcataacgcacccgcagcgcctgcaagacctgcatcaacttctgatttcgctgcgtcgagacgatctggccggccaatacgtcgcccctcgggccactgagcaacaggtaacacagctcgcgcatcagccctggaaacaggatatcggcggccagcggctggtcgagcaaatcgacgatacgcctggcgcaatcgagcaattgcgcattcaggtcaatggcaaaagcaggcacgggtgcaccggtgcacggcgtgatcacaccggccagcttttcgtacacctcactcaggatggcttggtcgaacaccacgaccaggctcaggtacggcgcatgattatcgccctccaccacctggctcgccccgggcaccgtcacgttgactattcttgcctggcccgcccggtattcctggcgctgctcgccgaatgcggtccacttcgcgccctgcagcaccatgcagatggcaggctgatgcaccaggtgcgtcgggtgccgttccgcctgggcgcgcatgaggaccacgccgtcgatgccggtgaggcaggggccggaatccgggctgcgtgataaatgacggctcacggcatcgcgtaacgcgtcgagggcgtgcatggtgttctcccgatgccctgacaagatcaggcaagaaatggccggatccgggcatgtcgattgccgcaggttagccgtatcgttttcaaccagcaacactcctttaaagaggctggaaccatgtctgataccccc

(The sequence listing continues in the following parts.)
